(19) United States
(12) Patent Application Publication
(10) Pub. No.: US 2021/0283234 A1
(43) Pub. Date: Sep. 16, 2021

(54) ENGINEERED SALMONELLA SEROVAR TYPHIMURIUM STRAINS, COMPOSITIONS THEREOF, AND METHODS OF USE

(71) Applicant: North Carolina State University, Raleigh, NC (US)

(72) Inventors: HOSNI M. HASSAN, Raleigh, NC (US); STEPHEN BRYAN TROXELL, Raleigh, NC (US)

(21) Appl. No.: 16/321,795

(22) PCT Filed: Jul. 28, 2017
(86) PCT No.: PCT/US2017/044336

§ 371 Date: Jan. 29, 2019

(51) Int. Cl. A61K 39/112; A61P 31/04; C12N 15/10

(52) U.S. Cl. CPC A61K 39/0275; A61K 2039/55588; C12N 15/102; A61P 31/04

(57) ABSTRACT

Provided herein are engineered Salmonella enterica serovar Typhimurium strains and compositions, including vaccines, thereof. Also provided herein are methods of treating and/or preventing infection by at least Salmonella enterica serovar Typhimurium in a subject in need thereof by administering a vaccine provided herein.

### CROSS-REFERENCE TO RELATED APPLICATIONS

[0001] This application claims the benefit of and priority to co-pending U.S. Provisional Patent Application No. 62/368,507, filed on Jul. 29, 2016, entitled “ENGINEERED SALMONELLA SEROVAR TYPHIMURIUM STRAINS, COMPOSITIONS THEREOF, AND METHODS OF USE,” the contents of which is incorporated by reference herein in its entirety.

### STATEMENT REGARDING FEDERALLY SPONSORED RESEARCH OR DEVELOPMENT

[0002] This invention was made with government support under grant number 2012-68003-19621 awarded by the United States Department of Agriculture's National Institute of Food and Agriculture (USDA NIFA). The government has certain rights to this invention.

### BACKGROUND

[0003] Foodborne infections caused by Salmonella enterica serovars are a significant problem worldwide. The non-Typhoid Salmonella (NTS) are problematic because these serovars may be able to infect multiple animal hosts. As such there exists an unmet need for improved preventatives and treatments for NTS.

### SEQUENCE LISTING

[0004] This application contains a sequence listing filed in electronic form as an ASCII.txt file entitled 221404-2110_ST25.txt, created on Jul. 28, 2017. The content of the sequence listing is incorporated herein in its entirety.

### BRIEF DESCRIPTION OF THE DRAWINGS

[0005] Further aspects of the present disclosure will be readily appreciated upon review of the detailed description of its various embodiments, described below, when taken in conjunction with the accompanying drawings.

[0006] FIG. 1 shows a schematic of an embodiment of a vaccination protocol used to vaccinate mice with a modified S. Typhimurium. The following symbols represent the different treatments at the specified time points: V=Vaccination; B=Boosting; C1=1^{st} Challenge; and C2=2^{nd} Challenge. In some experiments described herein, C57BL/6 or BALBc female mice (6-8 weeks of age) underwent the vaccination/challenge protocol outlined in FIG. 1. In each experiment, two groups of mice (vaccinated and control) were subjected to the protocol in FIG. 1. Each mouse in the vaccinated group received about 100 μl containing about 10⁷ CFU of strain NC983, while each mouse in the Naïve control group received an equal volume of a PBS solution. In a second experiment, venous blood from the tail was collected 1-day prior to V, B, and C1—as indicated by the open arrows [symbol] for assaying anti-Salmonella IgG response.

[0007] FIG. 2 shows a graph demonstrating percent survival of C57BL/6 mice subjected to the vaccination protocol shown in FIG. 1. Two groups of mice (control group, n=3; and vaccine group, n=6) were subjected to the vaccination protocol outlined in FIG. 1. Mice in the vaccine group received oral doses of NC983 equivalent to about 6×10⁷ CFU/mouse and about 5×10⁸ CFU/mouse for vaccination and boosting, respectively. Mice in the control group received PBS. Mice in both groups were challenged with S. Typhimurium strain (NC1189) at about 2×10⁵ CFU/mouse (100×LD₅₀); and surviving mice were challenged again with a higher dose of 4×10⁶ CFU/mouse (>1000×LD₅₀). Survival of mice was monitored over time and expressed as percent. Statistical comparison of survival curves using Log-ranked (Mantel-Cox) test showed a p-value of 0.0397.

[0008] FIG. 3 shows a graph demonstrating percent survival of BALB/c mice subjected to the vaccination protocol shown in FIG. 1. Two groups of mice (control group, n=5; and the vaccine group, n=6) were subjected to the vaccine protocol described in FIG. 1. At V and B, each mouse in the vaccinated group received 9×10⁶ CFU/mouse and 1×10⁸ CFU/mouse of NC983, respectively; while the control mice received PBS. At C1 and C2, mice were challenged with the virulent strain NC1040 at 6×10⁴ and 1.2×10⁶, respectively. Survival of mice was monitored over time and is expressed as percent. Statistical comparison of survival curves using Log-ranked (Mantel-Cox) test showed a p-value of 0.0009.

[0009] FIGS. 4A-4E show graphs demonstrating the IgG antibody titer of the vaccinated and boosted BALB/c mice. One day prior to V, B, and Cl (open arrows in FIG. 1) venous blood from the tail was removed to obtain the basal, vaccine-induced, and boosting-induced anti-Salmonella IgG response, respectively. Twenty-five micrograms of NC1040 protein were added to each well, serum samples prepared from tail's venous blood one-day before vaccination, boosting and challenge were 2-fold serially diluted, and analyzed in duplicate. Data shown are the log2 of the reciprocal dilution. Statistical significance was determined by comparing the mean OD450 values against the before V values at each dilution. The last reciprocal dilution with mean OD450 values that were significantly different than the before V values were considered the endpoint dilution. The dotted line (1:100; FDR adjusted p value=0.031) and solid line (1:3,200; FDR adjusted p value=0.018) show the endpoint dilutions for the before V and before B doses, respectively. A multiple t-test with a 5% false discovery rate (FDR) post-hoc test with multiple comparisons was used to determine significance. Significance was determined by comparing the mean OD450 values against the pre-vaccination values (vaccination experiment #2).

[0010] FIG. 5 shows a graph demonstrating attenuation of the modified S. Typhimurium strain (vaccine strain) as compared to the parent virulent strain. Four 6-8 week-old female C57BL/6 mice were orally inoculated with a mixture containing 9.1×10⁶ of NC1190 (NC983-Rif^{R}) and 8×10⁶ of NC1040 (ATCC 14028s-Kan^{R}). At four days post infection (dpi), mice were euthanized and the bacterial burden in homogenized tissues was determined. The competitive index (CI; [24]) was calculated using the following equation: (NC1190_{OUT}/NC1040_{OUT})/(NC1190_{IN}/NC1040_{IN}). Each data point is the logo of the CI from a single mouse and tissue site.

[0011] FIG. 6 shows an image demonstrating detection of the anti-S. Typhimurium IgG response by immunoblotting. The equivalent of 2×10⁸ cells of whole-cell lysate from strain 14028s was loaded per lane and samples were separated by size on 15% acrylamide gels. Following transfer, membranes were blocked and probed with serum from individual BALB/c mice. Serum samples were obtained by tail bleeding at V (1 dpv), B (13 dpv), and Cl (34 dpv) to determine the host IgG response. Membranes were probed with secondary antibody (anti-mouse IgG conjugated to HRP) and detection of horseradish peroxidase activity was determined with 4-chloro-1-napthol and H₂O₂, as described in Materials and Methods. Arrows [symbol] , represent antigen-antibody complexes; Stared arrow [symbol] , represents early antigen-antibody complex.

[0012] FIGS. 7A-7B show images demonstrating a ponceau S stain for protein (FIG. 7A) and corresponding immunoblot (FIG. 7B) demonstrating expression of the heterologous OspC antigen that was cloned into the modified S. Typhimurium strain.

[0013] FIG. 8 shows the percent survival in mice vaccinated with S. Typhimurium strains that include single deletions of fnr or ynaF.

[0014] FIG. 9 shows a graph demonstrating the percent survival in mice vaccinated with an S. Typhimurium strain that includes a deletion of 24 of 26 candidate virulence genes.

[0015] FIG. 10 shows a cartoon summary of the various S. Typhimurium mutant strains examined.

[0016] FIG. 11 shows a graph demonstrating the results of an experiment to analyze the kinetics of systemic colonization and competitive fitness of strain NC983 and virulent S. Typhimurium. Six groups of 4 female C57BL/6 mice (a total of 24 mice) were inoculated with 5×10⁷ CFU of NC983. At 1, 2, 4, 8, 15, and 35 days post vaccination, 4 mice were euthanized and the bacterial burden of NC983 in the spleen (filled circles) and liver (open circles) was determined. Each point is an individual mouse and the mean±1 standard deviation is shown. The dash line indicates the limit of detection.

[0017] FIG. 12 shows a graph demonstrating the results of an experiment to analyze the kinetics of systemic colonization and competitive fitness of strain NC983 and virulent S. Typhimurium. Four groups of 4 C57BL/6 mice (a total of 16 mice) were inoculated with 5×10⁷ CFU of NC1189 (virulent Typhimurium). At 1, 2, 4, and 6 days, 4 mice were euthanized and the bacterial burden in the spleen (filled circles) and liver (open circles) tissue was determined as in FIG. 11. The dash line indicates the limit of detection.

[0018] FIG. 13 shows a graph demonstrating the bacterial burden of the challenge strain (NC1189) in the vaccinated mice at the termination of the study demonstrated in FIG. 2. Tissue samples were homogenized and plated on XLT4 agar plates containing 100 μg/mL of rifampicin and incubated at about 37° C. for 24 h to enumerate bacteria. Rif^{R} H₂S producing colonies were counted and are expressed as logo of the CFU/g of tissue sample.

[0019] FIG. 14 shows a graph demonstrating the production of anti-S. Typhimurium IgG in vaccinated mice. At the end of the challenge experiment outlined in FIG. 1, serum was collected from the surviving animals and assayed for anti-Salmonella IgG. The last reciprocal dilution with mean OD₄₅₀ values that were significantly different than the negative control serum was considered the endpoint dilution. The solid line shows the mean endpoint dilution (1:256,000; FDR adjusted p-value=0.044). A multiple t-test with a 5% false discovery rate (FDR) post-hoc test with multiple comparisons was used to determine significance. Significance was determined by comparing the mean OD₄₅₀ values against naïve litter mate controls (shown as a dotted line).

[0020] FIG. 15 shows a graph demonstrating the bacterial burden of the virulent challenge strain (NC1040) in vaccinated mice at termination of experiment #2. Tissue samples were homogenized and plated on XLT4 agar plates containing 65 μg/mL of kanamycin and incubated at 37° C. for 24 h to enumerate bacteria. Kan^{R} H₂S colonies were counted and are expressed as logo of the CFU/g of tissue sample.

### DETAILED DESCRIPTION

[0021] Before the present disclosure is described in greater detail, it is to be understood that this disclosure is not limited to particular embodiments described, and as such may, of course, vary. It is also to be understood that the terminology used herein is for the purpose of describing particular embodiments only, and is not intended to be limiting.

[0022] Where a range of values is provided, it is understood that each intervening value, to the tenth of the unit of the lower limit unless the context clearly dictates otherwise, between the upper and lower limit of that range and any other stated or intervening value in that stated range, is encompassed within the disclosure. The upper and lower limits of these smaller ranges may independently be included in the smaller ranges and are also encompassed within the disclosure, subject to any specifically excluded limit in the stated range. Where the stated range includes one or both of the limits, ranges excluding either or both of those included limits are also included in the disclosure.

[0023] Unless defined otherwise, all technical and scientific terms used herein have the same meaning as commonly understood by one of ordinary skill in the art to which this disclosure belongs. Although any methods and materials similar or equivalent to those described herein can also be used in the practice or testing of the present disclosure, the preferred methods and materials are now described.

[0024] All publications and patents cited in this specification are herein incorporated by reference as if each individual publication or patent were specifically and individually indicated to be incorporated by reference and are incorporated herein by reference to disclose and describe the methods and/or materials in connection with which the publications are cited. The citation of any publication is for its disclosure prior to the filing date and should not be construed as an admission that the present disclosure is not entitled to antedate such publication by virtue of prior disclosure. Further, the dates of publication provided could be different from the actual publication dates that may need to be independently confirmed.

[0025] As will be apparent to those of skill in the art upon reading this disclosure, each of the individual embodiments described and illustrated herein has discrete components and features which may be readily separated from or combined with the features of any of the other several embodiments without departing from the scope or spirit of the present disclosure. Any recited method can be carried out in the order of events recited or in any other order that is logically possible.

[0026] Embodiments of the present disclosure will employ, unless otherwise indicated, techniques of molecular biology, microbiology, nanotechnology, organic chemistry, biochemistry, botany and the like, which are within the skill of the art. Such techniques are explained fully in the literature.

[0027] Definitions

[0028] As used herein, “about,” “approximately,” and the like, when used in connection with a numerical variable, generally refers to the value of the variable and to all values of the variable that are within the experimental error (e.g., within the 95% confidence interval for the mean) or within±10% of the indicated value, whichever is greater.

[0029] As used herein, “administering” can refer to an administration that is oral, topical, intravenous, subcutaneous, transcutaneous, transdermal, intramuscular, intra-joint, parenteral, intra-arteriole, intradermal, intraventricular, intracranial, intraperitoneal, intralesional, intranasal, rectal, vaginal, by inhalation, by catheters, stents or via an implanted reservoir or other device that administers, either actively or passively (e.g. by diffusion) a composition the perivascular space and adventitia. The term “parenteral” can include subcutaneous, intravenous, intramuscular, intra-articular, intra-synovial, intrasternal, intrathecal, intrahepatic, intralesional, and intracranial injections or infusion techniques.

[0030] As used herein, “adjuvant” can refer to an additional compound, composition, or ingredient that can facilitate stimulation an immune response in addition to the main antigen of a composition, formulation, or vaccine. Generally, an adjuvant can increase the immune response of an antigen as compared to the antigen alone. This can improve and/or facilitate any protective immunity developed in the recipient subject in response to the antigen. “Adjuvant” as used herein can refer to a component that potentiates the immune responses to an antigen and/or modulates it towards the desired immune response(s).

[0031] The term “antibody” as used herein can refer to an immunoglobulin which specifically binds to and is thereby defined as complementary with a particular spatial and polar organization of another molecule. The antibody can be monoclonal, polyclonal, or a recombinant antibody, and can be prepared by techniques that are well known in the art such as immunization of a host and collection of sera (polyclonal) or by preparing continuous hybrid cell lines and collecting the secreted protein (monoclonal), or by cloning and expressing nucleotide sequences, or mutagenized versions thereof, coding at least for the amino acid sequences required for specific binding of natural antibodies. Antibodies may include a complete immunoglobulin or fragment thereof, which immunoglobulins include the various classes and isotypes, such as IgA, IgD, IgE, IgG1, IgG2a, IgG2b and IgG3, IgM, IgY, etc. Fragments thereof may include Fab, Fv and F(ab′)₂, Fab′, scFv, and the like. In addition, aggregates, polymers, and conjugates of immunoglobulins or their fragments can be used where appropriate so long as binding affinity for a particular molecule is maintained.

[0032] As used herein, “antigen” refers to a molecule with one or more epitopes that stimulate a host's immune system to make a secretory, humoral and/or cellular antigen-specific response, or to a DNA molecule that is capable of producing such an antigen in a vertebrate. The term is also used interchangeably with “immunogen.” For example, a specific antigen can be complete protein, portions of a protein, peptides, fusion proteins, glycosylated proteins and combinations thereof.

[0033] As used herein, “control” is an alternative subject or sample used in an experiment for comparison purpose and included to minimize or distinguish the effect of variables other than an independent variable.

[0034] As used herein, “deoxyribonucleic acid (DNA)” and “ribonucleic acid (RNA)” generally refer to any polyribonucleotide or polydeoxribonucleotide, which can be unmodified RNA or DNA or modified RNA or DNA. RNA can be in the form of non-coding RNA such as tRNA (transfer RNA), snRNA (small nuclear RNA), rRNA (ribosomal RNA), anti-sense RNA, RNAi (RNA interference construct), siRNA (short interfering RNA), microRNA (miRNA), or ribozymes, aptamers or coding mRNA (messenger RNA).

[0035] As used herein, “dose,” “unit dose,” or “dosage” can refer to physically discrete units suitable for use in a subject, each unit containing a predetermined quantity of a composition, formulation, and/or vaccine described herein.

[0036] As used herein, “effective amount” is an amount sufficient to effect beneficial or desired results. An effective amount can be administered in one or more administrations, applications, or dosages.

[0037] As used herein, “expression” refers to the process by which polynucleotides are transcribed into RNA transcripts. In the context of mRNA and other translated RNA species, “expression” also refers to the process or processes by which the transcribed RNA is subsequently translated into peptides, polypeptides, or proteins.

[0038] As used herein, “engineered strain” can refer to a modified bacterial strain that can contain one or more structural (e.g. genetic, chemical, or otherwise) and/or functional modifications as compared to the wild-type strain.

[0039] As used herein, “gene” can refer to a hereditary unit corresponding to a sequence of DNA that occupies a specific location on a chromosome and that contains the genetic instruction for a characteristic(s) or trait(s) in an organism. “Gene” also refers to the specific sequence of DNA that is transcribed into an RNA transcript that can be translated into a polypeptide or be a catalytic RNA molecule including but not limited to tRNA, siRNA, piRNA, miRNA, long-non-coding RNA and shRNA.

[0040] As used herein, “gene deletion” can refer to a structural change (e.g. a point mutation, nucleotide addition and/or deletion) to the genome of an organism, including bacteria that results in a modulation in the function of a product produced from the region of the genome containing the structural change. The modulation can be a reduction, attenuation, elimination, or increase in the function and/or activity of the product produced form the region of the genome containing the structural change.

[0041] As used herein, “immune response” can refer to the reaction of the molecules, components, pathways, organs, fluids and/or cells of the body to the presence of a substance that is foreign or recognized by the body as foreign to the body.

[0042] As used herein, the term “immunization” can refer to the process of inducing a continuing protective level of antibody and/or cellular immune response which is directed against an S. enterica serovar, such as S. Typhimurium or antigen thereof, either before or after exposure of the host to a strain of S. enterica, such as S. Typhimurium, including but not limited to any one of the engineered S. Typhimurium strains described herein.

[0043] As used herein, “modulate or modulation of the immune response” can refer to change in the immune response that results from the introduction of a composition, vaccine, or other compound or formulation described herein in a recipient subject as compared to a suitable control.

[0044] The term “molecular weight”, as used herein, generally refers to the mass or average mass of a material. If a polymer or oligomer, the molecular weight can refer to the relative average chain length or relative chain mass of the bulk polymer. In practice, the molecular weight of polymers and oligomers can be estimated or characterized in various ways including gel permeation chromatography (GPC) or capillary viscometry. GPC molecular weights are reported as the weight-average molecular weight (M_{W}) as opposed to the number-average molecular weight (Mₙ). Capillary viscometry provides estimates of molecular weight as the inherent viscosity determined from a dilute polymer solution using a particular set of concentration, temperature, and solvent conditions.

[0045] As used herein, “nucleic acid” and “polynucleotide” generally refer to a string of at least two base-sugar-phosphate combinations and refers to, among others, single-and double-stranded DNA, DNA that is a mixture of single-and double-stranded regions, single- and double-stranded RNA, and RNA that is mixture of single- and double-stranded regions, hybrid molecules comprising DNA and RNA that can be single-stranded or, more typically, double-stranded or a mixture of single- and double-stranded regions. In addition, polynucleotide as used herein refers to triple-stranded regions comprising RNA or DNA or both RNA and DNA. The strands in such regions can be from the same molecule or from different molecules. The regions can include all of one or more of the molecules, but more typically involve only a region of some of the molecules. One of the molecules of a triple-helical region often is an oligonucleotide. “Polynucleotide” and “nucleic acids” also encompasses such chemically, enzymatically or metabolically modified forms of polynucleotides, as well as the chemical forms of DNA and RNA characteristic of viruses and cells, including simple and complex cells, inter alia. For instance, the term polynucleotide includes DNAs or RNAs as described above that contain one or more modified bases. Thus, DNAs or RNAs comprising unusual bases, such as inosine, or modified bases, such as tritylated bases, to name just two examples, are polynucleotides as the term is used herein. “Polynucleotide” and “nucleic acids” also includes PNAs (peptide nucleic acids), phosphorothioates, and other variants of the phosphate backbone of native nucleic acids. Natural nucleic acids have a phosphate backbone, artificial nucleic acids can contain other types of backbones, but contain the same bases. Thus, DNAs or RNAs with backbones modified for stability or for other reasons are “nucleic acids” or “polynucleotide” as that term is intended herein.

[0046] As used herein, “pharmaceutically acceptable carrier, diluent, binders, lubricants, glidant, preservative, flavoring agent, coloring agent, and excipient” refers to a carrier, diluent, binder, lubricant, glidant, preservative, flavoring agent, coloring agent, or excipient that is useful in preparing a pharmaceutical formulation that is generally safe, non-toxic, and is neither biologically or otherwise undesirable, and includes a carrier or excipient that is acceptable for veterinary use as well as human pharmaceutical use.

[0047] As used herein, “polypeptides” or “proteins” are amino acid residue sequences. Those sequences are written left to right in the direction from the amino to the carboxy terminus. In accordance with standard nomenclature, amino acid residue sequences are denominated by either a three letter or a single letter code as indicated as follows: Alanine (Ala, A), Arginine (Arg, R), Asparagine (Asn, N), Aspartic Acid (Asp, D), Cysteine (Cys, C), Glutamine (Gln, Q), Glutamic Acid (Glu, E), Glycine (Gly, G), Histidine (His, H), Isoleucine (Ile, I), Leucine (Leu, L), Lysine (Lys, K), Methionine (Met, M), Phenylalanine (Phe, F), Proline (Pro, P), Serine (Ser, S), Threonine (Thr, T), Tryptophan (Trp, VV), Tyrosine (Tyr, Y), and Valine (Val, V).

[0048] As used herein, “preventative” refers to hindering or stopping a disease or condition before it occurs or while the disease or condition is still in the sub-clinical phase.

[0049] As used herein, the term “recombinant” generally refers to a non-naturally occurring nucleic acid, nucleic acid construct, or polypeptide. Such non-naturally occurring nucleic acids can include natural nucleic acids that have been modified, for example that have deletions, substitutions, inversions, insertions, etc., and/or combinations of nucleic acid sequences of different origin that are joined using molecular biology technologies (e.g., a nucleic acid sequences encoding a “fusion protein” (e.g., a protein or polypeptide formed from the combination of two different proteins or protein fragments), the combination of a nucleic acid encoding a polypeptide to a promoter sequence, where the coding sequence and promoter sequence are from different sources or otherwise do not typically occur together naturally (e.g., a nucleic acid and a constitutive promoter etc.). Recombinant also refers to the polypeptide encoded by the recombinant nucleic acid. Non-naturally occurring nucleic acids or polypeptides include nucleic acids and polypeptides modified by man, including but not limited to miRNA target sequences described herein.

[0050] As used interchangeably herein, “subject,” “individual,” or “patient,” refers to a vertebrate and/or a mammal. Mammals include, but are not limited to, murines, simians, humans, farm animals, sport animals, and pets. The term “pet” includes a dog, cat, guinea pig, mouse, rat, rabbit, ferret, and the like. The term farm animal includes a horse, sheep, goat, chicken, pig, cow, donkey, llama, alpaca, turkey, and the like.

[0051] As used herein, “therapeutic” can refer to treating or curing a disease or condition.

[0052] As used herein, “vaccine” can refer to a compound, molecule, compositions, and formulations that are capable of inducing an immune response in a subject. The term “vaccine” can also be used to refer to a compound, molecule, compositions, and formulations that are capable of providing protective immunity against an organism. The vaccine may provide protection against a same (i.e. homologous) or different (i.e. heterologous) strain of an organism. The vaccine can be capable of providing protection against homologous and heterologous species, variants or strains.

[0053] As used herein, “wild-type” can refer the typical form of an organism, variety, strain, gene, protein, or characteristic as it occurs in nature, as distinguished from mutant forms that may result from selective breeding or transformation with a transgene.

[0054] Discussion

[0055] Salmonella is a bacterial pathogen that can cause a spectrum of human and animal diseases. Most salmonella infections are caused by food infected (contaminated) with S. enterica, which can infect cattle, poultry, and other domestic animals. Raw chicken and poultry eggs can also harbor S. enterica. Over 2,600 serovars have been identified for S. enterica, many of which are highly pathogenic to humans. Among the serogroups that cause the most human-related illnesses are S. Enteritidis, Typhi, and Typhimurium.

[0056] Current methods of reducing salmonella infection in farm animals are to prevent infection of the animals through good sanitation and hygiene practices. Efforts are made by farms and veterinarians to identify and isolate infected animals to prevent disease throughout a herd or flock.

[0057] Another methodology for reducing and preventing salmonella infection is to vaccinate animals, particularly those that may serve as transmission vectors for the bacteria. There are several vaccines currently available for S. Typhimurium, including Salmune, Poulvac ST, and Nobilis Salenvac T. The currently available vaccines for S. Typhimurium are based on a single gene mutation, which carries the risk of virulence returning from a compensatory mutation. As such, there exists a need for an improved vaccine that can at least provide protection against S. Typhimurium.

[0058] With that said, described herein are strains of S. Typhimurium that can have a deletion of more than one gene and that can have an attenuated virulence as compared to the unmodified strain. Also provided herein are vaccines that can contain modified S. Typhimurium bacteria that can have a deletion of more than one gene. In some embodiments, the S. Typhimurium strain can include a deletion of about 26 kb of the genome of the virulent parent strain. The strains of attenuated S. Typhimurium provided herein can provide a safer vaccination against S. Typhimurium as opposed to current vaccinations at least because there is a reduced possibility of compensatory mutations or reversion in the modified strain of S. Typhimurium. Other compositions, compounds, methods, features, and advantages of the present disclosure will be or become apparent to one having ordinary skill in the art upon examination of the following drawings, detailed description, and examples. It is intended that all such additional compositions, compounds, methods, features, and advantages be included within this description, and be within the scope of the present disclosure.

[0059] Engineered Strain(s) of S. Typhimurium and Compositions Thereof

[0060] Provided herein are engineered strains of S. Typhimurium. The engineered strain of S. Typhimurium can include one or more gene deletions as compared to the wild-type S. Typhimurium (also referred to herein as the reference or parent strain). The wild-type S. Typhimurium serovar can be Salmonella enterica serovar Typhimurium 14028s, which can have a genomic sequence according to GenBank Accession No. NC_016855.1 (SEQ ID NO: 3) (Jarvik et al., 2010. J. Bacteriol 192:560-567) (SEQ ID NO: 3). The gene deletions of the engineered strain of S. Typhimurium can be genes residing between about nucleotides 1,736,853 and 1,764,155 of the wild-type S. Typhimurium. Table 1 lists various genes in the wild-type S. Typhimurium and their corresponding base pairs in the reference wild-type sequence.

TABLE 2

| Gene | Start bp | End bp |
|---|---|---|
| STM14_1981 | 1736853 | 1738403 |
| STM14_1982 | 1738867 | 1739529 |
| STM14_1983 | 1739800 | 1740330 |
| STM14_1984 | 1740447 | 1741247 |
| STM14_1985 | 1741311 | 1745156 |
| STM14_1986 | 1745414 | 1746019 |
| STM14_1987 | 1746016 | 1746465 |
| STM14_1988 | 1746608 | 1746931 |
| STM14_1989 | 1746939 | 1747130 |
| STM14_1990 | 1747130 | 1749766 |
| STM14_1991 | 1750006 | 1750995 |
| STM14_1992 | 1751106 | 1751516 |
| STM14_1993 | 1751560 | 1751715 |
| STM14_1994 | 1751742 | 1752041 |
| STM14_1995 | 1752102 | 1755626 |
| STM14_1996 | 1755685 | 1755894 |
| STM14_1998 | 1756592 | 1756930 |
| STM14_1999 | 1757094 | 1757234 |
| STM14_2000 | 1757286 | 1758221 |
| STM14_2001 | 1758265 | 1759638 |
| STM14_2003 | 1761254 | 1762408 |
| STM14_2004 | 1762419 | 1762580 |
| STM14_2005 | 1762819 | 1763382 |
| STM14_2006 | 1763640 | 1764155 |

[0061] The engineered strain of S. Typhimurium can include any single gene deletion of a gene, where the gene deleted can be selected from the following group of genes: STM14_1981, STM14_1982, STM14_1983, STM14_1984, STM14_1985, STM14_1986, STM14_1987, STM14_1988, STM14_1989, STM14_1990, STM14_1991, STM14_1992, STM14_1993, STM14_1994, STM14_1995, STM14_1996, STM14_1998, STM14_1999, STM14_2000, STM14_2001, STM14_2003, STM14_2004, STM14_2005, and STM14_2006.

[0062] The engineered S. Typhimurium strain can include any combination of 2,3,4,5,6,7,8,9, . . . 27 gene deletions, where the gene deleted can be selected from the following group of genes: STM14_1981, STM14_1982, STM14_1983, STM14_1984, STM14_1985, STM14_1986, STM14_1987, STM14_1988, STM14_1989, STM14_1990, STM14_1991, STM14_1992, STM14_1993, STM14_1994, STM14_1995, STM14_1996, STM14_1997, STM14_1998, STM14_1999, STM14_2000, STM14_2001, STM14_2002, STM14_2003, STM14_2004, STM14_2005, STM14_2006, and STM14_2007, except for the combination of STM14_1982, STM14_1983, STM14_1984, STM14_1985, STM14_1986, STM14_1987, STM14_1988, STM14_1989, STM14_1990, STM14_1991, STM14_1992, STM14_1993, STM14_1994, STM14_1995, STM14_1996, STM14_1997 STM14_1998, STM14_1999, STM14_2000, STM14_2001, STM14_2002, STM14_2003, STM14_2004, STM14_2005, and STM14_2006.

[0063] In some embodiments, the engineered S. Typhimurium strain can include a deletion of STM14_1981, STM14_1982, STM14_1983, STM14_1984, STM14_1985, STM14_1986, STM14_1987, STM14_1988, STM14_1989, STM14_1990, STM14_1991, STM14_1992, STM14_1993, STM14_1994, STM14_1995, STM14_1996, STM14_1997, STM14_1998, STM14_1999, STM14_2000, STM14_2001, STM14_2002, STM14_2003, STM14_2004, STM14_2005, and STM14_2006.

[0064] The engineered strains can be attenuated as compared to the wild-type S. Typhimurium.

[0065] Methods of genome modification (including nucleotide deletion and addition) are known to those of ordinary skill in the art. The engineered strains can be made and cultured using techniques of molecular biology, recombinant DNA technology, microbiology, and the like generally known to one of ordinary skill in the art.

[0066] Also provided herein are engineered S. Typhimurium bacteria, and/or compositions thereof as described herein, wherein the engineered S. Typhimurium bacteria previously described herein can be further engineered to include and/or express the foreign epitope. As used herein, “foreign epitope” can refer to an epitope that is considered non-self when compared to the subject that the foreign epitope is being delivered to. Methods of genome modification generally known in the art can be used to design and further modify the engineered S. Typhimurium bacteria to include and/or express a desired foreign epitope.

[0067] Also provided herein are whole cell compositions that can contain an engineered strain of S. Typhimurium described elsewhere herein. The compositions can contain an amount of one or more engineered S. Typhimurium strains described herein. The engineered S. Typhimurium strain(s) can be included as live bacteria in the composition. This can be possible as the engineered S. Typhimurium strain(s) can be attenuated as the result of the gene deletions. In some embodiments, the engineered S. Typhimurium strain(s) can be killed prior to inclusion in the composition. In embodiments, the compositions contain whole cell isolates of the engineered S. Typhimurium strains provided herein. Methods of killing bacteria for use in a composition, such as but not limited to a vaccine, are generally known in the art. Some of these methods include heat and chemical (e.g. by formaldehyde) killing. The engineered S. Typhimurium strains can independently be included in the composition in an amount or concentration ranging from about 10² cells per mL to about 10¹⁰ cells or more per mL. It will be appreciated that different amounts can be used or be effective in compositions, such as vaccines, for immunizing different species, which will be appreciated by one of ordinary skill in the art. Where two strains are included in the composition the ratio of each strain to each other can range from 1:1 to 10:1. It will be appreciated that the ratio of each strain can vary in effectiveness depending on species being immunized, which will be appreciated by one of ordinary skill in the art.

[0068] Vaccines

[0069] The compositions containing an engineered strain of S. Typhimurium strain(s) described herein can be formulated as vaccines. The compositions can be included in a combination vaccine or other combination formulation. In some embodiments, the combination vaccine or other combination formulation can include one or more engineered strain of S. Typhimurium strain(s) described herein as described herein and one or more additional killed and/or modified strain or isolate of another species or genus of bacterium, antigenic component of another species or genus of bacterium, killed or attenuated virus, antigenic component of a virus, and/or antibodies raised against another pathogenic organism.

[0070] The compositions and/or vaccines can contain an effective amount or concentration of one or more engineered S. Typhimurium strains described herein. The amount can be effective to stimulate an immune response, stimulate antibody production, provide protective immunity, immunize, treat, and/or prevent S. enterica, particularly the S. enterica serovar Typhimurium in the subject and/or offspring thereof. The effective amount or concentration of the one or more engineered strain of S. Typhimurium can range from about 10² cells per mL to about 10¹⁰ cells or more per mL. The compositions, vaccines, and/or other formulations described herein can be effective to stimulate an immune response, stimulate antibody production, and provide protective immunity against a strain of S. enterica serovar Typhimurium in the subject and/or offspring thereof. The effective amount or concentration of the one, immunize a subject against S. enterica serovar Typhimurium, treat and/or prevent any S. enterica serovar Typhimurium infection in the subject and/or offspring thereof. In embodiments, the subject can be a chicken, other avian species, or other domestic farm animal species.

[0071] The vaccines can contain one or more additional ingredients. The vaccines can include one or more suitable adjuvants. Suitable adjuvants are generally known in the art and can include, but are not limited to aluminum salts (e.g, aluminum phosphate and aluminum hydroxide), organic adjuvants (e.g. squalene), and oil-based (e.g., MF59). In embodiments, the vaccines can contain a suitable pharmaceutically acceptable carrier. Suitable pharmaceutically acceptable carriers include, but are not limited to, water, salt solutions, alcohols, gum arabic, vegetable oils, benzyl alcohols, polyethylene glycols, gelatin, carbohydrates such as lactose, amylose or starch, magnesium stearate, talc, silicic acid, viscous paraffin, perfume oil, fatty acid esters, hydroxyl methylcellulose, and polyvinyl pyrrolidone, which do not deleteriously react with the active composition.

[0072] The vaccines can be sterilized, and if desired, mixed with auxiliary agents, such as lubricants, preservatives, stabilizers, wetting agents, emulsifiers, salts for influencing osmotic pressure, buffers, coloring, flavoring and/or aromatic substances, and the like which do not deleteriously react with the active composition. In some embodiments, the vaccine can be produced under clean and/or sterile conditions. In some the vaccine can be produced under clean and/or sterile conditions but is not necessarily sterilized.

[0073] In addition to the engineered S. Typhimurium strain(s), the vaccines can also include an amount, including an effective amount, of one or more of auxiliary active agents, including but not limited to, DNA, RNA, amino acids, peptides, polypeptides, antibodies, aptamers, ribozymes, guide sequences for ribozymes that inhibit translation or transcription of essential tumor proteins and genes, hormones, immunomodulators, antipyretics, anxiolytics, antipsychotics, analgesics, antispasmodics, anti-inflammatories, anti-histamines, anti-infectives, and chemotherapeutics.

[0074] Methods of Treating and/or Preventing S. enterica serovar Typhimurium Infection

[0075] The compositions, and vaccines provided herein can be administered to a subject. The subject can be a chicken other avian species, other domestic farm animal species, or human subjects (including, but not limited to farm workers and the public). The chicken can be a chicken 2 weeks or older. The chicken can be a chicken less than two weeks of age. In some embodiments, the subject is a late stage embryo. In embodiments, the chicken can be a hen that is producing eggs. Administration of a composition and/or vaccine provided herein can induce or otherwise stimulate an immune response in the recipient subject and/or an offspring of the recipient subject. Administration of a composition, and/or vaccine provided herein can stimulate antibody production in the recipient subject. In other embodiments, administration of a composition and/or vaccine provided herein can provide protective immunity against S. enterica serovar Typhimurium in a recipient subject and/or an offspring of the recipient subject. Administration of a compound, composition, formulation, and/or vaccine provided herein can to a subject can treat/and or prevent S. enterica serovar Typhimurium infection in the recipient subject and/or offspring thereof.

[0076] Accordingly, provided herein are methods of inducing or otherwise stimulating an immune response in a subject and/or an offspring of the subject that include the step of administering a compound, composition, formulation and/or vaccine to a subject one or more times. Also provided herein are methods of stimulating antibody production in a subject and/or offspring of the subject that includes the step of administering a composition and/or vaccine to a subject one or more times. Also provided herein are methods of stimulating protective immunity a subject and/or offspring thereof by administering a composition and/or vaccine to a subject one or more times. Also provided herein are methods of treating and/or preventing S. enterica serovar Typhimurium infection by administering a composition and/or vaccine to a subject one or more times. In embodiments, the amount of the composition and/or vaccine can be an amount effective to stimulate an immune response, stimulate antibody production, provide protective immunity, immunize, treat, and/or prevent S. enterica serovar Typhimurium in the subject and/or offspring thereof.

[0077] The compositions and/or vaccines provided herein can be administered to the subject by any suitable route(s). In addition to the other suitable routes described elsewhere herein, the compositions and/or vaccines can be administered by water supply, aerosol mist, and/or vapor that can be applied through a misting system configured for vaccine delivery to multiple chickens, and/or by in ovo injection. Other suitable routs of administration include any other route generally used for delivery of vaccines and other compositions to chickens, avians, and other domestic farm animals. Such methods and routes of administration will be appreciated by those of ordinary skill in the art. In some embodiments, 0.01 cc to 10 cc or more of the composition and/or vaccine can be administered to a subject. It will be appreciated by those of skill in the art will depend on, inter alia, the size of the subject, the species of the subject, and the concentration of cells in the formulation being administered. In some embodiments, an amount effective to induce an immune response against S. enterica serovar Typhimurium in the recipient subject and/or offspring thereof.

[0078] The compositions and/or vaccines provided herein can be administered to subject one or more times. Where administration occurs more than once the time period between each does can each independently range from days (e.g. 1-7 days), weeks (e.g. 1-52 weeks, or years (e.g. 1-5 years) apart. Administration can occur during any life stage of the subject. Where the subject is a chicken or other avian, administration can, in some embodiments, occur in ovo, (e.g. 3-5 days before hatch), during the early post-hatch period (e.g. during the first two weeks post hatch), and during egg production. Administration can be simultaneously or in series with other vaccines.

[0079] Also provided herein are methods of delivering a foreign epitope to a subject in need thereof. As used herein, “foreign epitope” can refer to an epitope that is considered non-self when compared to the subject that the foreign epitope is being delivered to. The method can include administering engineered S. Typhimurium bacteria and/or composition thereof described herein to a subject in need thereof, wherein the engineered S. Typhimurium bacteria can be further engineered to include and/or express the foreign epitope as described elsewhere herein.

### EXAMPLES

[0080] Now having described the embodiments of the present disclosure, in general, the following Examples describe some additional embodiments of the present disclosure. While embodiments of the present disclosure are described in connection with the following examples and the corresponding text and figures, there is no intent to limit embodiments of the present disclosure to this description. On the contrary, the intent is to cover all alternatives, modifications, and equivalents included within the spirit and scope of embodiments of the present disclosure.

### Example 1

### Complete Genome Sequence of a Salmonella enterica serovar Typhimurium Live, Attenuated Strain

[0081] Strain NC983 is highly attenuated in mice (1, unpublished data). NC983 was generated through fusaric acid-mediated removal of the tetracycline marker (2) from an fnr::Tn10 mutation in S. Typhimurium ATCC 14028s. DNA was extracted from lysed bead beaten (Biospec Products; Bartlesville, Okla.) NC983 cells using a FastDNA™ SPIN Kit for Soil (MP Biomedicals; Santa Ana, Calif.). Eluted DNA was concentrated and processed with the PacBio whole-genome sequencing workflow using the Pacific Biosciences RS II sequencing platform (Pacific Biosciences, Menlo Park, Calif.). The 20-kb SMRTbell™ Templates kit was used for template preparation. The library was prepared using a 10-kb template library preparation workflow from size-selected templates (BluePippin™ V3 Cassette Definition for 10,000 bp). Three SMRT cells were used on a PacBio RS II sequencer with the C4 sequencing chemistry and P6 polymerase. The Ion Torrent reads were obtained from fragmented DNA and libraries were prepared and purified using AMPure beads. Specific adapters Ion P1 and Ion Xpress™ Barcode X were ligated to fragmented DNA using the Ion Plus Fragment Library and Barcode Adapters Kits (Life Technology, Thermo Fisher Division, Waltham, Mass.). Ligated DNA was nick repaired, purified, size-selected, and amplified. DNA templates were sequenced on an Ion Torrent PGM using Ion PGM300 sequencing reagents (Life Technology). Base pair calling and sequence trimming were performed on the Ion Torrent browser.

[0082] The PacBio continuous long reads were error corrected using the Hierarchical Genome Assembly Process (HGAP) workflow (PacBioDevNet; Pacific Biosciences; SMRT Analysis version 2.2) and a de novo assembly of the corrected reads was conducted using MIRA version 4.0.2 (3). The resulting assembly (48×) consisted of six contigs, two of which were large non-repetitive contigs. Ion Torrent reads (19×) were mapped to the alignment of the two large contigs using MIRA to increase the average consensus quality. The resulting consensus contigs were circularized using the Minimus 2 assembler (4) and polished using Quiver (5).

[0083] The longer of the two contigs mapped to the chromosomal reference sequence of 14028s (NC_016856.1; 4,870,265 bp) and the shorter of the two contigs mapped to the plasmid reference sequence of 14028s (NC_016855.1; 93,832 bp) (6). Five G/C homopolymer runs in protein coding regions within the chromosomal contig were corrected by adding either a single G or C to match that of the 14028s reference. After circularization and polishing, the chromosomal DNA was 4,846,304 bp in length (average PacBio base coverage: 298×) and the virulence plasmid, pLST, was 93,829 bp in length (average PacBio base coverage: 461×).

[0084] The NCBI Prokaryotic Genome Annotation Pipeline (available online) was used for annotation and it identified 4,612 protein coding-genes with 85 tRNAs, 8 5S, 7 16S, and 7 23S rRNA genes. Strain NC983 contains a large deletion that removed base pairs 1,737,878 to 1,764,448 from the genome of 14028s (6). This stretch of sequence in 14028s has been replaced in NC983 with a 1,332 bp remnant of the Tn10 transposable element. The complete genome and virulence plasmid sequences of NC983 were deposited in GenBank with Accession numbers CP015157 (SEQ ID NO: 1) and CP015158 (SEQ ID NO: 2), respectively.

### References for Example 1

[0085] 1. Fink R C, Evans M R, Porwollik S, Vazquez-Torres A, Jones-Carson J, Troxell B, Libby S J, McClelland M, Hassan H M. 2007. FNR is a global regulator of virulence and anaerobic metabolism in Salmonella enterica serovar Typhimurium (ATCC 14028s). J Bacteriol 189:2262-2273.
[0086] 2. Bochner B R, Huang H C, Schieven G L, Ames B N. 1980. Positive selection for loss of tetracycline resistance. J Bacteriol 143:926-933.
[0087] 3. Chevreux B, Wetter T, Suhai S. 1999. Genome Sequence Assembly Using Trace Signals and Additional Sequence Information. Computer Science and Biology: Proceedings of the German Conference on Bioinformatics (GCB) 99: 45-56.
[0088] 4. Sommer D D, Delcher A L, Salzberg S L, Pop M. 2007. Minimus: a fast, lightweight genome assembler. BMC Bioinformatics 8, 64.
[0089] 5. Chin C S, Alexander D H, Marks P, Klammer A A, Drake J, Heiner C, Clum A, Copeland A, Huddleston J, Eichler E E, Turner S W, Korlach J. 2013. Nonhybrid, finished microbial genome assemblies from long-read SMRT sequencing data. Nat Meth 10:563-569.
[0090] 6. Jarvik T, Smillie C, Groisman E A, Ochman H. 2010. Short-term signatures of evolutionary change in the Salmonella enterica serovar Typhimurium 14028 genome. J Bacteriol 192:560-567.

### Example 2

### Vaccination With Attenuated S. Typhimurium Strains

[0091] Background. Foodborne pathogens are a group of infectious agents that threaten public health. An example of this is the non-Typhoidal Salmonella enterica (NTS) serovars. NTS have been linked to the majority of bacterial foodborne outbreaks within the U.S.A. [1]. Among NTS, the serovar S. Typhimurium has been one of the most frequently identified by the Center for Disease Control (CDC). According to the CDC, this serovar was implicated in two outbreaks/year during 2014, 2013, and 2012, three outbreaks in 2011, and one in 2009 and 2006.

[0092] Early work determined that a live attenuated strain generates superior protection against wild-type challenge compared to heat inactivation of a virulent strain [2]. Subsequently, several strategies were employed to attenuate Salmonella including mutations affecting: metabolic functions (i.e., auxotrophic mutants), virulence genes, LPS biosynthesis, or other regulatory elements [Reviewed in 3-5]. Thus, mutants of S. enterica strains bearing defects in aromatic amino acid biosynthesis (e.g., aroA and aroD) and nucleic acid biosynthesis (e.g., purA and purE), as well as, mutations in the UDP-glucose 4-epimerase (galE) functioned as live-attenuated vaccines for multiple Salmonella serovars [6-12]. However, auxotrophic mutants have the potential for a reversion of virulence that is partially influenced by the host's diet [6,13]. Furthermore, recent findings showed ΔaroA mutants to be metabolically and physiologically pleotropic, and introduction of ΔaroA in an attenuated strain of Salmonella increased its virulence in mouse models [14]. S. Typhimurium strains deleted in the lipoprotein genes (IppAB) alone or in combination with an acetyltransferase gene (msbB), that is required for the modification of lipid-A in LPS, provided protective immunity in mice [15]. A recent systematic review and meta-analysis of 126 published studies describing the use of Salmonella vaccines in swine (majority were S. Typhimurium and S. Choleraesuis strains) concluded that the use of vaccines was beneficial but variable [16]. Clearly, the search for better Salmonella vaccines for use in farm animals and protect the consumers is far from over.

[0093] Earlier work showed that strain NC983 is attenuated in mice [17]; however, its utility as a live attenuated vaccine strain was not contemplated or tested. Strain NC983 is derived from the highly virulent strain 14028s (American Type Culture Collection strain, ATCC 14028s; a smooth-colony variant derived from CDC60-6516) that was isolated in 1960 from samples of hearts and livers of 4-week-old chickens [18, 19]. Strain NC983 contains a large deletion that removed base pairs 1,737,878 to 1,764,448 from the genome of 14028s [20, Example 1]. Because of this large deletion, it is less likely that this strain will undergo a reversion to virulence within the host. This genetic region is conserved within the S. enterica genomes sequenced to date.

[0094] In this Example, data is presented that can demonstrate that strain NC983 can be a vaccine. Strain NC983 was observed to be immunogenic as evidenced from induction of an anti-Salmonella immunoglobulin (IgG) response. In addition, competition experiments demonstrated that strain NC983 exhibited a profound decrease in fitness within the spleen (about 4 orders of magnitude) compared to the parental virulent strain. Strain NC983 protected Salmonella sensitive (Ity^{s}; C57BL/6 and BALB/c) mouse backgrounds from wild-type challenge.

[0095] Materials and Methods.

[0096] Bacterial Strains. Table 2 lists the bacterial strains used in this Example. The parental strain used in this study is from ATCC. Construction of spontaneous rifampicin resistant Typhimurium strains were generated as described previously [21]. Strain NC1040 is a kanamycin resistant derivative of 14028s that is fully virulent in mice and was constructed as described previously [21].

TABLE 2

| Strain | Genotype^{a} | Source |
|---|---|---|
| Salmonella enterica serovar | Wild-Type | ATCC^{b} |
| Typhimurium 14028s | | |
| NC983 | Fusaric Acid Resistant | [17] |
| NC1040 | ATCC 14028s fnr′:ha (Kan^{R}) | [21] |
| NC1189 | ATCC 14028s (Rif^{R}) | This |
| | | Example |
| NC1190 | NC983 (Rif^{R}) | This |
| | | Example |

^{a}Rif^{R} (rifampicin resistant) and Kan^{R} (kanamycin resistant)
^{b}ATCC (American Type Culture Collection)

[0097] Bacterial Growth and Preparation of Cell Suspensions. NC983 or the challenge strains were grown overnight at 37° C. in about 100 ml of Luria-Bertani (LB; 10 g tryptone, 5 g yeast extract, and 10 g NaCI per L) under static culture conditions. Bacteria were centrifuged, washed in phosphate buffered saline (PBS), and resuspended in a small volume (about 3 mL) of PBS. The optical density at 600 nm (OD₆₀₀) of the concentrated cell suspension was determined using a BioRad Smartspec 3000 with a 1 cm light path, and adjusted, according to a standard predetermined relationship between OD₆₀₀ and viable cell counts (i.e., 1 OD₆₀₀ about 1×10⁹ CFU/mL), to an appropriate cell density as indicated in the results. The cell suspension was diluted and plated to confirm the actual viable CFU/ml.

[0098] Animals. Six to eight week old C57BL/6 and BALB/c (Ity^{s}, both strains are S. Typhimurium sensitive) female mice from Jackson Laboratories (Bar Harbor, Me.) and Harlan Lab (now Envigo, Indianapolis, Ind.), respectively, were used. Mice were housed in disposable cages (3-4 mice per cage) and had access to sterile water and food (PicoLab Mouse Diet 2) ad libitum.

[0099] Determination of dose required to kill 50% of mice (Wa). The lethal dose required to kill 50% of animals (LD₅₀) for S. Typhimurium ATCC 14028s was determined under our conditions. Four groups of mice (4-mice per group) each received an oral dose of about 3.5×10¹, about 3.5×10², about 3.5×10³, or about 3.5×10⁴ CFU/mouse. Mice were monitored for about 14 days and the LD₅₀ was calculated from 10 day survival data according to [22] and [23]. The LD₅₀ was about 10³ CFU per C57BL/6 mouse.

[0100] Fitness of NC983 in vivo. To determine the ability of NC983 to colonize different tissues, groups of 3-4 C57BL/6 female mice (aged 6-8 weeks) were inoculated with about 5×10⁷ CFU/mouse of either the parental strain (14028s) or the vaccine strain (NC983). Mice were euthanized at indicated time points and viable S. Typhimurium within the spleen and liver were determined as described above. In another experiment, the competitive index (CI; [24) for NC983 Rif^{R} (i.e., NC1190) and the virulent 14028s Kan^{R} (i.e., NC1040) was determined. Four mice, C57BL/6 as above, were given an oral dose of about 9.1×10⁶ and about 8×10⁶ of NC1190 and NC1040, respectively. At four days post infection (dpi), mice were euthanized and the bacterial burden in homogenized tissues was determined by plating each sample on XLT4 agar plates containing rifampicin (to enumerate NC983), and XLT4 agar plates containing about 65 μg/mL kanamycin (to enumerate 14028s).

[0101] Vaccination and Challenge Protocols.

[0102] The mice were subjected to the vaccination protocol shown in FIG. 1. The vaccination and boosting doses were determined in preliminary studies. Each vaccinated or challenged mouse received a 100 μL of the appropriate cell suspension (see above) by oral gavage. Control mice received an equal volume of the PBS solution.

[0103] In vaccination experiment #1, C57BL/6 mice were given a vaccination dose (about 10⁷ CFU/mouse) and at 14 days post vaccination (dpv) they received a boosting dose (about 10⁸ CFU/mouse). In earlier experiments, the vaccination doses ranged from about 1×10⁷ to about 5×10⁷. Boosting doses were administered at varying times post initial vaccination (between 8 and 15 days post initial vaccination). The boosting dose was varied between about 5×10⁶ to about 1×10⁸. Based on animal body condition score and IgG titer, that vaccine and boosting doses of about 10⁷ and about 10⁸, respectively, were optimal for the immune response although positive results were observed at other doses (data not shown). At 21 days post boosting, (equals 35 dpv) all mice were challenged with a dose of 100× the LD₅₀ (about 10⁵ CFU/mouse) of the virulent S. Typhimurium strain (NC1189 (Rif^{R}) and disease symptoms were monitored using the body condition scoring (BCS) as described [25]. A BCS score of 2 indicates that the animal is under-conditioned and is considered moribund. A BCS score of 2 is observed in mice that exhibit segmentation of vertebral column with detectable pelvic bones. A BCS score of 4-5 indicates a healthy mouse that does not exhibit lack of grooming, eating/drinking, nesting, and other functions of active mice. Mice that survived until 69 dpv were re-challenged with a higher dose, 1,000×LD50 (i.e., 10⁶ CFU/mouse). At 90 dpv (i.e., 55 and 21 days post first and second challenges, respectively), all mice were euthanized, blood for analysis of the anti-Salmonella IgG response was obtained by cardiac puncture. Cardiac puncture blood was collected at the end of vaccine experiment #1 in Sarstedt micro tube 1.1 ml Z-gel (Fisher Scientific, catalog #50-809-211), samples were treated, and serum collected according to the supplier instructions. The bacterial burden of the challenge strain (NC1189) was determined within the colon, spleen, and liver following homogenization of tissues and plating on buffered XLT4-MOPS agar plates containing 100 μg/mL rifampicin as described previously [21].

[0104] In vaccination experiment #2 (BALB/c) mice were given the vaccine, boost, and challenge doses (C1 and C2) as described above and in FIGS. 2 and 13-14. To measure the antibody response in BALB/c mice to the vaccine strain NC983 in a longitudinal manner, venous blood was obtained through tail bleeding at one day prior to vaccination (before V), boosting (before B), and the 1^{st} challenge (C1; before C1; FIG. 1).

[0105] Measurement of the anti-Salmonella IgG response by ELISA. Venous or cardiac puncture blood was allowed to clot at room temperature (about 20 minutes) before centrifuging at 20,000×g for 15 minutes at 4° C. and the supernatant (i.e., serum) was used to measure the anti-Salmonella IgG response.

[0106] To determine the end-point titers for detection of anti-Salmonella antigen, strain 14028s Kan^{R} (i.e., NC1040) was grown without shaking (still) overnight in LB containing 20mM glucose (glucose was added to improved cell yield). Cells were centrifuged, washed with PBS, concentrated in PBS followed by 60-cycles of sonication (each cycle was about 15 seconds on and about 30 seconds off and 60 cycles combined for a total sonication time of about 15 minutes) using a 20 KHz Heat Systems-Ultrasonics, Inc sonicator, model W-370—set at about 50% of its max output. Samples were kept on ice during and between rounds of sonication. The cell debris was removed by centrifugation at about 20,000×g for 15 minutes and the supernatant (cell-free extract, CF-Ext) was used as the Salmonella antigen. The protein concentration in the CF-Ext was determined using the Biorad Protein Assay Dye Reagent Concentrate according to manufacturer's specifications (Biorad; Hercules, Calif.).

[0107] Proteins from the cell-free extracts were diluted in ELISA coating buffer (about 50 mM carbonate-bicarbonate, pH 9.6; Sigma-Aldrich, St. Louis, Mo.) to about 250 μg/mL. One hundred μL of the solution was added to each well (about 25 μg) of a Corning 96-well EIA/RIA clear flat bottom polystyrene microplate (product #3361) and the plate was incubated overnight at about 4° C. The following day the solution in each well was removed and wells were washed three times with about 200 μL wash solution (about 50 mM Tris base, about 0.14 M NaCl, about 0.05% Tween 20, about pH 8.0). After washing, the wells were blocked for 15 minutes with the addition of about 200 μL of Super Block (ScyTek Laboratories, Inc; Logan, Utah). Serum samples from mice were 2-fold serially diluted in antibody buffer (about 50 mM Tris, about 0.14 M NaCl, 1% BSA) and about 100 μL of each dilution were added to wells in duplicate. Plates were incubated at room temperature for about 2 hours and washed as described above. Secondary antibody (Rabbit anti-mouse IgG (H+L) conjugated to HRP; Southern Biotech, Birmingham, Ala.) was diluted in antibody buffer to 1: about 10,000 and about 100 μL was added to each well. Plates were incubated at room temperature for about 2 hours and washed as described above. About 100 μL of HRP substrate, 1-Step™ Ultra TMB-ELISA Substrate Solution (ThermoFisher Scientific; Waltham, Mass.), was added to each well and incubated at room temperature for about 15 minutes. The reaction was terminated by the addition of about 100 μL of 2 M H₂SO₄ and the absorbance at 450 nm was recorded with a multi-mode plate reader (BioTek Synergy HTX; BioTek Instruments, Inc, Winooski, Vt.). Mean absorbance values were plotted against the Log₂ of the reciprocal dilution. A multiple t-test with a 5% false discovery rate (FDR) post-hoc test with multiple comparisons was used to determine significance. Significance was determined by comparing the mean OD₄₅₀ values of naïve litter mate controls (vaccination experiment #1) or against the pre-vaccination values (vaccination experiment #2). Figures and statistical analysis were accomplished using GraphPad Prism v7.03.

[0108] Measurement of the anti-Salmonella IgG response by immunoblot. Strain 14028s was grown as described above, centrifuged, washed, and the cell pellets were suspended in Laemmli sample buffer. Samples were denatured by boiling. Approximately 2×10⁸ cells were loaded per lane and samples were separated by size on 15% acrylamide gels (SDS-PAGE) and transferred to about 0.2 μM nitrocellulose membranes (Bio-Rad, Hercules, Calif.). Immunoblotting was performed as described previously [26, 27]. Briefly, membranes were stained with Ponceau S (about 0.1% Ponceau S (w/v), 1% acetic acid) to ensure equivalent loading of samples. For immunoblotting, membranes were blocked in a blocking buffer (PBS containing about 0.05% Tween-20 and about 1% powered non-fat milk, about pH 7.4) and probed with serum from BALB/c mice (primary antibody at about 1:1,000 for about 3 h). Membranes were washed 3 times with the blocking buffer and probed with secondary antibody (peroxidase-conjugated goat anti-IgG mouse antibody; Jackson ImmunoResearch Laboratories; West Grove, Pa.) at about 1:5,000 for about 3 h. Membranes were washed 3 times with Tris-NaCl (about 50 mM Tris, about 200 mM NaCl, about pH 7.6) and detection of horseradish peroxidase activity was determined in Tris-NaCl using 4-chloro-1-napthol (4CN; dissolved in methanol) and H₂O₂ (Thermo Fisher Scientific; Waltham, Mass.).

[0109] Statistical Analysis.

[0110] For survival plots, Log-ranked (Mantel-Cox) test was applied using Graph Pad Prism v. 7.03. For statistical analysis of anti-Salmonella IgG, a multiple t-test with a 5% false discovery rate (FDR) post-hoc test with multiple comparisons (Graph Pad Prism v. 7.03) was used to determine significance. In all cases p-values<0.05 were considered significant.

[0111] Results.

[0112] Strain NC983 exhibits a fitness defect in the colonization of the spleen. The kinetics of liver and spleen colonization for strain NC983 and the challenge virulent strain 14028s -Rif^{R} (NC1189) was determined. At 1 dpv, 3 out of the 4 mice had detectable levels of NC983 in the spleen and liver tissues (FIG. 11). At 2 dpv, all mice had quantifiable levels of NC983, but at 4, 8, and 15 dpv there was at least one mouse at each time point with undetectable levels of NC983 (FIG. 11). At 35 dpv, one mouse had detectable NC983 in the splenic tissues (FIG. 11. On the other hand, the kinetics of liver and spleen colonization by the virulent challenge strain, 14028s-Rif^{R} (NC1189), showed a different pattern (FIG. 12). At days 1, 2, 4, and 6 post infection, mice were euthanized and the bacterial burden was determined. By 4 dpi, all mice had concentrations of the challenge strain that were >10⁴ CFU/g tissue; and at 6 dpi, concentrations of 14028s-Rif^{R} (NC1189) reached about 10⁷ CFU/g in all mice (FIG. 12). No further time-point data were collected because the mice had a body condition score (BCS) about 2 and were euthanized.

[0113] Clearly, at days 1 and 2 post inoculation the kinetics of colonization of the liver and spleen by the vaccine strain was like that of the wild-type parent strain. However, at beyond 4 dpv, the vaccine strain showed much weaker colonization of the liver and spleen than the wild-type. This finding was confirmed by the data from the Competitive Index study (FIG. 5) In this type of assay, the fitness of the vaccine strain in the different murine tissues is simultaneously compared to that of the wild-type strain in the same animal [24] and FIG. 5. The Logo of the competitive index (CI) for the vaccine strain (NC1190) versus the challenge strain NC1040 was variable between the different animals in the colon and liver tissue sites, with an average fitness defect of about 2 orders of magnitude (FIG. 5). However, within the spleen for all mice there was a clear fitness defect of about 4 orders of magnitude (i.e., 10,000-fold reduction) between the vaccine strain compared to the virulent strain (NC1040) (FIG. 5). The kinetics and CI data (FIGS. 5 and 11-12) indicated that strain NC983 has a general fitness defect in the mice, but showed a clear and profound defect within the spleen.

[0114] Strain NC983 is a live attenuated Salmonella strain that protects against virulent S. Typhimurium and is immunogenic in mice. Previous work demonstrated that strain NC983 was unable to cause lethal infection in C57BL/6 mice when inoculated through either peroral or intraperitoneal routes [17]. This evidence suggested that NC983 maybe attenuated in mice and further studies were needed to test its ability to confer protective immunity in mice. Therefore, a vaccination protocol was developed to test the ability of NC983 to protect against challenge with virulent S. Typhimurium (FIG. 1). This protocol utilized oral inoculation (i.e., vaccination and boost) of mice with either strain NC983 (vaccine group) or a PBS control. At 35 days post-vaccination (dpv), all mice were challenged with the virulent strain of S.Typhimurium ATCC 14028s, as outlined in Materials and Methods and FIG. 1. The percent survival of mice was recorded for the duration of the study, bacterial burden of the challenge strain in vaccinated mice and anti-Salmonella IgG in vaccinated mice were determined at the end of the study (FIGS. 2 and 13-14).

[0115] The data showed that by day 17 post challenge, all control mice (n=3) had died or required euthanasia (FIG. 2). Although one mouse of the vaccinated group was found dead after the boosting, the remaining mice (n=5) exhibited 100% survival post the two challenges (FIG. 2). At 90 dpv, all mice were euthanized and samples were processed to determine the bacterial burden of the WT virulent S. Typhimurium strain in the vaccinated mice (FIG. 13). The level of the vaccine strain (NC983) was undetectable in all tissues and the colon of these mice (data not shown). However, the challenge strain was found in quantifiable levels in colon samples from two mice. In addition, three splenic samples and two liver samples exhibited levels of the challenge strain between 10² and 10³ CFU/g (FIG. 13). When the anti-S. Typhimurium IgG levels were measured from these mice at 90-dpv, the mean endpoint titer was 1:256,000 (FDR adjusted p value=0.044; FIG. 14).

[0116] The vaccination protocol was repeated (vaccine experiment #2) with another Salmonella sensitive strain of mice (BALB/c) to ensure results from C57BL/6 were not strain specific. In this experiment, a preliminary LD₅₀ for the BALB/c showed that it was slightly lower than that of the C57BL/6 mice. However, to be on the safe-side, we used the same LD₅₀ as that for the C57BL/6. Also, the responses of individual mice were measured over time in a longitudinal approach (FIGS. 3 and 15). At 35 dpv, the BALB/c mice received on oral dose of the virulent strain, NC1040 (6.4×10⁴ CFU/mouse). By 7 days post challenge (C1, or 42 dpv), all control mice had died or required euthanasia (FIG. 3). At 21 days post challenge (56 dpv), one vaccine group mouse had to be euthanized; however, the remaining five mice survived another challenge dose (C2; 1.2×10⁶ CFU/mouse) (FIG. 3). At the end of the experiment (90 dpv), the bacterial burden of the challenge strain NC1040 was determined. Three mice (mouse 1, 2, and 5) had detectable levels of the challenge strain in all three examined tissues (colon, spleen, and liver). However, we did not detect the challenge strain in the colons of mouse 3 or 4. In addition, mouse 3 contained the challenge strain in the spleen and liver tissues, but mouse 4 had no challenge strain in any examined sites (FIG. 15).

[0117] To measure the IgG response to NC983, serum was obtained through tail bleeding at one day prior to vaccination, boosting, and the 1^{st} challenge (FIG. 1). The mean endpoint titer taken before the boosting dose (13 dpv, before B) was 1:100 (dotted line, FDR adjusted p value=0.031; FIGS. 4A-4E). The mean endpoint titer after vaccination and boosting was 1:3,200 (solid line, FDR adjusted p value=0.018; FIGS. 4A-4E). Serum samples from individual mice were probed against whole cell lysates from S. Typhimurium by immunoblotting (FIG. 6) The data showed that serum taken before vaccination had no cross reactivity to S. Typhimurium antigens (lanes marked V). However, after vaccination 3 out of 5 mice showed a cross reactivity band at about 40 kDa (lanes marked B); but after the second inoculation (boosting) all mice showed multiple cross reactivity bands (lanes marked C1). Clearly, there was significant increase in cross reactivity to S. Typhimurium antigens from all mice at the C1 time point (i.e., just before the challenge) (FIG. 6). Indeed, further studies are needed to identify the different S. Typhimurium antigens reacting with the antibodies produced in the immunized mice.

[0118] The expression of the heterologous antigen OspC from Borrelia burgdorferi in the vaccine strain (NC983, the modified S. Typhimurium strain) was examined. FIGS. 7A-7B show the ponceau S stain for protein (FIG. 7A) and corresponding immunoblot (FIG. 7B) demonstrating expression of the heterologous OspC antigen that was cloned into the modified S. Typhimurium strain. The sequenced expression vector plasmid containing the ospC-flag gene was cloned into the Typhimurium vaccine strain. IPTG was added to one culture for induction of the OspC-FLAG while the other culture did not contain IPTG. After four hours of induction, the cells were concentrated and treated for SDS-PAGE. Approximately, 10⁷ cells from each culture were loaded per lane. FIG. 7A is a Ponceua S stain of the membrane to demonstrate that equivalent levels of protein were present in each lane. FIG. 7B is the immunoblot that detected the OspC-FLAG protein of the expected size (about 26-27 kDa).

[0119] The NC983 (vaccine strain) contains a deletion of 25 genes and 2 truncated genes associated with attenuation virulence (solid bracket in FIG. 10). Different modified strains containing different gene deletions within the 25 genes that are deleted in the NC983 strain were generated and examined. FIG. 8 shows a graph demonstrating percent survival vs. time (days) post-infection of mice that were vaccinated with a strain that carried different defined deletions of one of two candidate genes (Δfnr or ΔynaF) or the parent (unmodified) virulent strain. Briefly, groups of four female C57BL/6 (6-10 weeks old) mice were challenged with the defined single mutants Δfnr, ΔynaF, or the virulent strain. Neither of these candidate genes did conferred the vaccine phenotype. In other words, neither of these two genes alone confer virulence phenotype, thus the lack of attenuation when either one was deleted.

[0120] The NC983 (vaccine strain) contains a deletion of 25 genes and 2 truncated genes associated with the virulence phenotype (solid bracket in FIG. 10). A modified strain was made that contained defined deletions of 25 of the 27 candidate attenuation-associated genes that lie within the region of the NC983 strain. (Large dashed bracket in FIG. 10). Briefly, a group of four female C57BL/6 (6-10 weeks old) mice were challenged with the defined deletion that inactivated 25 of the 26 genes missing from the vaccine strain. As shown in FIG. 9, defined deletions of 25 of the 26 candidate genes within the missing region of the vaccine strain did not confer attenuation of virulence (vaccine phenotype).

[0121] FIG. 10 shows a cartoon summary of the genetic arrangements studies to examine the gene(s) involved in generating the vaccine (NC983) phenotype. The vaccine strain (NC983) has a deletion that inactivates at least 27 genes. As shown in of FIG. 10, 25 genes are completely removed and 2 are partially truncated. Systematic inactivation of two of the candidate genes responsible for the vaccine phenotype, fnr and ynaF, did not replicate the phenotype. In addition, inactivation of the 25 of the 27 genes did not replicate the vaccine phenotype. Genetic regions with a solid black bracket indicate a mutation that confers attenuation whereas a dashed bracket indicates that deletion of this region is still virulent. The largest dashed region (Region 1) corresponds to the deletion of 25 of the 27 genes that were deleted. The dashed region labeled Region 2 corresponds to the deletion of ynaF (STM14_1997) The dashed region labeled Region 3 corresponds to the deletion of zntB (STM14_2002) The dashed region labeled Region 4 corresponds to the deletion of fnr (STM 14_2007).

[0122] Summary.

[0123] Highly invasive S. Typhimurium and NTS isolates are becoming increasingly problematic in specific areas [28-31]. Therefore, there is a demand for effective preventative measures. This Example can at least demonstrate the effectiveness of a live attenuated S. Typhimurium strain (NC983) that fully protected two Salmonella sensitive mice strains from challenge with virulent S. Typhimurium. Strain NC983 was sporadically capable of reaching systemic tissues sites while exhibiting a pronounced fitness defect in the spleen. Collectively, these results support the at least that strain NC938 is attenuated and elicits protective immunity in mice models.

### References for Example 2

[0124] 1. CDC: Surveillance for Foodborne Disease Outbreaks—United States, 2009-2010. MMWR Morb Mortal Wkly Rep 2013, 62(03):41-47.

[0125] 2. Germanier R: Immunity in experimental salmonellosis. 3. Comparative immunization with viable and heat-inactivated cells of Salmonella typhimurium. Infect Immun 1972, 5(5):792-797.

[0126] 3. Curtiss R 3^{rd}, Kelly S M, Hassan J O: Live oral avirulent Salmonella vaccines. Vet Microbiol 1993, 37(3-4):397-405.

[0127] 4. Desin T S, Koster W, Potter A A: Salmonella vaccines in poultry: past, present and future. Expert Rev Vaccines 2013, 12(1):87-96.

[0128] 5. Spreng S, Dietrich G, Weidinger G: Rational design of Salmonella-based vaccination strategies. Methods 2006, 38:133-143.

[0129] 6. Hoiseth S K, Stocker B A: Aromatic-dependent Salmonella typhimurium are non-virulent and effective as live vaccines. Nature 1981, 291(5812):238-239.

[0130] 7. Smith B P, Reina-Guerra M, Hoiseth S K, Stocker B A, Habasha F, Johnson E, Merritt F: Aromatic-dependent Salmonella typhimurium as modified live vaccines for calves. Am J Vet Res 1984, 45(1):59-66.

[0131] 8. Smith B P, Reina-Guerra M, Stocker B A, Hoiseth S K, Johnson E: Aromatic-dependent Salmonella dublin as a parenteral modified live vaccine for calves. Am J Vet Res 1984, 45(11):2231-2235.

[0132] 9. Mukkur T K, McDowell G H, Stocker B A, Lascelles A K: Protection against experimental salmonellosis in mice and sheep by immunisation with aromatic-dependent Salmonella typhimurium. J Med Microbiol 1987, 24(1):11-19.

[0133] 10. Nnalue N A, Stocker B A: Test of the virulence and live-vaccine efficacy of auxotrophic and galE derivatives of Salmonella choleraesuis. Infect Immun 1987, 55(4):955-962.

[0134] 11. Edwards M F, Stocker B A: Construction of delta aroA his delta pur strains of Salmonella typhi. J Bacteriol 1988, 170(9):3991-3995.

[0135] 12. Levine M M, Herrington D, Murphy J R, Morris J G, Losonsky G, Tall B, Lindberg A A, Svenson S, Baqar S, Edwards M F et al: Safety, infectivity, immunogenicity, and in vivo stability of two attenuated auxotrophic mutant strains of Salmonella typhi, 541Ty and 543Ty, as live oral vaccines in humans. J Clin Invest 1987, 79(3):888-902.

[0136] 13. Stocker B A: Aromatic-dependent salmonella as anti-bacterial vaccines and as presenters of heterologous antigens or of DNA encoding them. J Biotechnol 2000, 83(1-2):45-50.

[0137] 14. Feigner S, Frahm M, Kocijancic D, Rohde M, Eckweiler D, Bielecka A, Bueno E, Cava F, Abraham W-R, Curtiss R3^{rd}, et al: aroA-deficient Salmonella enterica Serovar Typhimurium is more than a metabolically attenuated mutant. mBio 2016, 7(5):e01220-16.

[0138] 15. Erova T E, Kirtley M L, Fitts E C, Ponnusamy D, Baze W B, Andersson J A, Cong T, Tiner B L, Sha J, Chpra A K: Protective immunity elicited by oral immunization of mice with Salmonella enterica Serovar Typhimurium Braun lipoprotein (Lpp) and acetyltransferase (MsbB) mutants. Front Cell Infect Microbiol 6:148.

[0139] 16. de la Cruz M L, Conrado I, Nault A, Perez A, Dominguez L, Alvarez J: Vaccination as a control strategy against Salmonella infection in pigs: a systematic review and meta-analysis of the literature. Res Vet Sci 2017, 114:86-94.

[0140] 17. Fink R C, Evans M R, Porwollik S, Vazquez-Torres A, Jones-Carson J, Troxell B, Libby S J, McClelland M, Hassan H M: FNR is a global regulator of virulence and anaerobic metabolism in Salmonella enterica serovar Typhimurium (ATCC 14028s). Journal of bacteriology 2007, 189(6):2262-2273.

[0141] 18. Porwollik S, Santiviago C A, Cheng P, Long F, Desai P, Fredlund J, Srikumar S, Silva C A, Chu W, Chen X et al: Defined single-gene and multi-gene deletion mutant collections in Salmonella enterica sv Typhimurium. PLoS One 2014, 9(7):e99820.

[0142] 19. Jarvik T, Smillie C, Groisman E A, Ochman H: Short-term signatures of evolutionary change in the Salmonella enterica serovar typhimurium 14028 genome. J Bacteriol 2010, 192(2):560-567.

[0143] 20. Troxell B, Fink R C, Dickey A N, Scholl E H, Hassan H M: Complete Genome Sequence of NC983, a Live Attenuated Strain of Salmonella enterica Serovar Typhimurium. Genome Announc 2016, 4(5).

[0144] 21. Troxell B, Petri N, Daron C, Pereira R, Mendoza M, Hassan H M, Koci M D: Poultry body temperature contributes to invasion control through reduced expression of Salmonella pathogenicity island 1 genes in Salmonella enterica serovars Typhimurium and Enteritidis. Appl Environ Microbiol 2015, 81(23):8192-8201.

[0145] 22. Reed L Ja M H.: A simple method of estimating fifty percent endpoints. The American Journal of Hygiene 1938, 27:493-497.

[0146] 23. Finney D J: Probit analysis: a statistical treatment of the sigmoid response curve. Cambridge, England: Cambridge University Press; 1952.

[0147] 24. Freter R, O'Brien P C, Macsai M S: Role of chemotaxis in the association of motile bacteria with intestinal mucosa: in vivo studies. Infect Immun 1981, 34(1):234-240.

[0148] 25. Ullman-Cullere M H, Foltz C J: Body condition scoring: a rapid and accurate method for assessing health status in mice. Lab Anim Sci 1999, 49(3):319-323.

[0149] 26. Troxell B, Ye M, Yang Y, Carrasco S E, Lou Y, Yang X F: Manganese and zinc regulate virulence determinants in Borrelia burgdorferi. Infect Immun 2013, 81(8):2743-2752.

[0150] 27. Troxell B, Xu H, Yang X F: Borrelia burgdorferi, a pathogen that lacks iron, encodes manganese-dependent superoxide dismutase essential for resistance to streptonigrin. J Biol Chem 2012, 287(23):19284-19293.

[0151] 28. Graham S M: Nontyphoidal salmonellosis in Africa. Curr Opin Infect Dis 2010, 23(5):409-414.

[0152] 29. Gordon MA: Invasive nontyphoidal Salmonella disease: epidemiology, pathogenesis and diagnosis. Curr Opin Infect Dis 2011, 24(5):484-489.

[0153] 30. Ao T T, Feasey N A, Gordon M A, Keddy K H, Angulo F J, Crump J A: Global burden of invasive nontyphoidal Salmonella disease, 2010(1). Emerg Infect Dis 2015, 21(6).

[0154] 31. Feasey N A, Dougan G, Kingsley R A, Heyderman R S, Gordon M A: Invasive non-typhoidal salmonella disease: an emerging and neglected tropical disease in Africa. Lancet 2012, 379(9835):2489-2499.

The application's sequence listing, which the Patent Office published only in electronic form, follows.

SEQUENCE LISTING (3 sequences)

SEQ ID NO: 1 - DNA, 4846304 bp, Artificial Sequence (residues 1-1,615,435 of 4,846,304)
  GenBank No.: CP015157; Salmonella enterica subsp. enterica serovar Typhimurium strain NC983 chromosome, complete geneome
agagattacgtctggttgcaagagatcatgacagggggaattggttgaaaataaatatatcgccagcagcacatgaacaagtttcggaatgtgatcaatttaaaaatttattgacttaggcgggcagatactttaaccaatataggaatacaagacagacaaataaaaatgacagagtacacaacatccatgaaccgcatcagcaccaccaccattaccaccatcaccattaccacaggtaacggtgcgggctgacgcgtacaggaaacacagaaaaaagcccgcacctgaacagtgcgggcttttttttcgaccagagatcacgaggtaacaaccatgcgagtgttgaagttcggcggtacatcagtggcaaatgcagaacgttttctgcgtgttgccgatattctggaaagcaatgccaggcaagggcaggtagcgaccgtactttccgcccccgcgaaaattaccaaccatctggtggcaatgattgaaaaaactatcggcggccaggatgctttgccgaatatcagcgatgcagaacgtattttttctgacctgctcgcaggacttgccagcgcgcagccgggattcccgcttgcacggttgaaaatggttgtcgaacaagaattcgctcagatcaaacatgttctgcatggtatcagcctgctgggtcagtgcccggatagcatcaacgccgcgctgatttgccgtggcgaaaaaatgtcgatcgcgattatggcgggacttctggaggcgcgtgggcatcgcgtcacggtgatcgatccggtagaaaaattgctggcggtgggccattaccttgaatctaccgtcgatatcgcggaatcgactcgccgtatcgccgccagccagatcccggccgatcacatgatcctgatggcgggctttaccgccggtaatgaaaagggtgaactggtggtgctgggccgtaatggttccgactattccgccgccgtgctggccgcctgtttacgcgctgactgctgtgaaatctggactgacgtcgatggcgtgtatacctgtgacccgcgccaggtgccggacgccaggctgctgaaatcgatgtcctaccaggaagcgatggaactctcttacttcggcgccaaagtccttcaccctcgcaccattacgcccatcgcccagttccagatcccctgtctgattaaaaataccggtaatccgcaggcgccaggaacgctgatcggcgcgtccagcgacgatgataacctgccggttaaagggatctctaaccttaacaacatggcgatgtttagcgtctccggcccgggaatgaaagggatgattgggatggcggcgcgtgttttcgccgccatgtctcgcgccgggatctcggtggtgctcattacccagtcctcctctgagtacagcatcagtttctgtgtgccgcagagtgactgcgcgcgtgcccgccgtgcgatgcaggatgagttctatctggagctgaaagaggggctgctggagccgctggcggttacggagcggttggcgattatctctgttgtcggcgacggtatgcgcacgctacgcggcatttcagcgaaattcttcgccgcgctggcgcgggctaatatcaatatcgtggcgatcgctcagggatcttctgagcgttctatttctgtggtggtgaataacgacgatgccaccaccggcgtgcgggtaacgcaccagatgctgttcaataccgatcaggtgattgaagtgtttgtcattggcgtcggcggcgtcggcggcgcgctactggaacagcttaaacgtcagcaaacctggctgaagaacaagcacatcgatctacgcgtgtgcggcgtggcgaactcaaaggcgttgctaaccaatgtgcatggcctgaatctggacaactggcaggcggaactggcgcaagcgaacgcgccgttcaatctgggacgcttaattcgcctggtgaaagaatatcatctactcaatccggtgattgttgattgtacctccagtcaggcggtggccgaccagtatgccgacttcctgcgtgaagggttccatgtggtgacgccaaacaagaaagcgaacacctcgtcaatggactactaccatcagctacgtttcgccgccgcgcaatcacggcgcaaattcttgtatgacaccaacgtcggcgccggtttgccggtaatcgaaaacctgcaaaacctgctgaatgccggtgatgaactgcaaaaattttccggcattctttccgggtcgctctcttttattttcggtaaactggaagaggggatgagtctctcacaggcgaccgccctggcgcgcgagatgggctataccgaacccgatccgcgcgacgatctttccggtatggatgtggcgcgtaaactgttgatcctcgcccgcgagacgggccgcgagctggagctttccgatattgtgattgaaccggtgttgccgaacgagtttgacgcctccggcgatgtgaccgcctttatggcacatctgccgcagcttgacgacgcgtttgccgcccgtgtggcgaaagctcgtgatgaaggtaaggtattgcgctatgtgggcaatatcgaagaggatggcgtgtgccgcgtgaaaattgccgaagttgatggtaacgatccgctcttcaaagtgaaaaacggtgaaaacgcgctggcgttctacagccactattatcagcccttgccgttggtgctgcgcggctacggcgcaggcaatgatgtgacggcggcgggcgtgtttgccgatctgttacggaccctctcatggaagttaggagtttaacatggtgaaagtgtatgccccggcttccagcgcgaacatgagcgtcggtttcgacgtgttgggcgcagccgtcacacccgttgacggcacgttgctgggcgatgtggtatccgttgaagcagcggaccatttccgtctgcataacctggggcgatttgccgataaactgccgccggagccgcgtgaaaatattgtttatcagtgctgggaacgtttttgccaggcattggggaaaaccatcccggtggcgatgacgctggaaaaaaatatgccgattggttccgggttagggtccagcgcctgttccgtcgtcgccgcgctggtcgcgatgaatgagcactgcggcaaaccgttaaacgacacgcgtctgttggcgctgatgggcgagctggaaggccgtatctccggcagcatccattacgataacgtcgcgccgtgctttcttggcggtatgcagttgatgattgaagaaaacggcattattagtcagcaggtgccgggctttgatgagtggctatgggtactggcttatccgggcattaaagtttctaccgcagaagcacgggccattttgcctgcgcagtatcgccgtcaggattgcattgcgcatggacggcatctggccggttttattcacgcctgttactcgcggcagccgcagcttgccgccgcgctgatgaaagatgttattgccgaaccataccgcgcgcgtttactgccgggctttagccaggcgcggcaggcggtgtcggagatcggcgcgctggcgagcgggatttccgggtcggggccgacgctgtttgcgctatgcgataaaccggagacggcgcagcgcgtcgcggactggctgagcaaacattatctgcaaaatcaggaaggcttcgttcatatttgccggctggatacggcgggcgcacgagtagtgggataatcaatgaaactctataatctgaaagaccataatgagcaggtcagctttgcgcaggccgtcacgcaaggactgggcaaacagcagggacttttttttccgcacgatctgccggagtttagcctgacggaaattgatgagatgctcaaccaggactttgtcagccgtagcgcaaagatcctctcggcatttattggcgatgaaataccgcagcaaattctggaagagcgcgtccgcgcggcgtttgcgttcccggcaccggtagcgcaggtagaaagcgatgtcggctgcctggagctgttccatggtccgacgctggcctttaaagacttcggcgggcgttttatggcgcaaatgctgacgcatatcagcggcgacaaaccggtgacgattctgactgcaacgtcaggcgataccggcgcggcggtggctcacgcgttctatggcctggaaaatgtgcgggtcgtcattctctacccgcgcggtaagatcagtccgttgcaggaaaaactgttctgtacgctgggcggcaacattgaaaccgtggcgatcgacggcgatttcgacgcgtgccaggcgctggtgaaacaggcatttgatgacgaagaactgaaaacggcgctggggctgaattcggctaattcgattaatatcagccgcctgttggcgcaaatttgctactactttgaagccgtggcgcaactgccgcagggggcgcgtaaccaactggtgatctccgtccccagcggcaactttggcgatttgacggcagggctgctggcgaagtcgttaggcctaccggtgaaacgttttatcgccgccaccaacgtcaacgacacggtgccgcgttttctgcatgacggaaagtgggcgccgaaagcgacgcaggcgaccctgtcgaatgcgatggatgtcagccagccgaataactggccgcgcgtggaggagctattccgccgtaaaatctggcgcctgactgagctgggctatgcggcggtggatgatactacgacacagcagacgatgcgcgagctgaaagcgaaaggttatatctcggaacctcatgcggcggtagcgtatcgggcattacgcgaccagttaaaccctggcgagtatggcttgtttctcggaacggcgcatccggcgaagtttaaagagagcgtggagtccattctgggagaaacgctggccttgcctgaagcgctcgccgaacgcgccgacctgccgctgctttcacatcatctgcctgcggattttgccgccctgcgtaagctgatgatgacccgccaataaccattgcgcccggtggcgctgtcgcttaccgggcctatggggtggtgtcgatttgtaggccggataaggcgtaaccgccatccggcgatgccgttactgctcgtagcgtttaaagaccagctcgtcttgtgtggaggtttcttcatcaaagaaatacccttcacggtcaaacgcggtaagctgttccggcttcgttaagcggttttcaataataaaacggctcatcagtccgcgcgcttttttggcgtagaagcttaccaccttaaacttgccgtttttctcatcaaggaacacgggcttaatcagttcggcattcagtttcttcggcttcaccgatttaaaatattcctcggaggccagattcaccaccacccgatcgccctgcgcctcaagcgcttcgttgagcttatcggtaatgatatcgccccagaattgataaagatctttgccgcgcggattctccaggcgaatccccatctccagacgataaggctgcattaaatccagcgggcgcaatacgccatacaagccagagagcatacgcagatgttgttgagcaaaatcaaaatccgcgtcgttgaacgtttccgcctgtaggccggtataaacatcgcctttgaacgccagaatcgcctggcgtgcattatccggcgtaaaatgaggctgccagtcatgaaaacgcgtggcgttgagatccgccagtttgtcgctaattcccatcagcctggaaatttgcggcgccgaaagctggcgggcctgttgaataagctgctggctgtgatccaacagctccggctgggtatagcgggtcgtggccagcgggctttgataatcaagcgtttttgcaggtgaaatcagaatcagcatattcagtccttgcagggaattttctgcgactttagcaaaaaaacgccgcagagttgaccgatggttgcgattgtcggcttaatcgcgcgatgccgcctcccaggtatctggcgccagttgtggttcgatatccgggaagcgccgcggatcgaactgcggtcttacgcccagtttccgttgtcgcagataatcgctggcgagggtatacaccaccggtgagagcaacaaaatcgccgtcagattggtaatggccatacaggccatgatcatgtcagcgagctgccatatcagcggaaaactgataagcgtaccggcgataaccatgccaagcgtcgcaaggcgtaatagccagatagcctttgcgttatgtaaccgcagaaaaaacagattgttttcggcgtaaatatagttggcgacgatagaactgaacgcgaacagaatgacgataagcgcgacaaaactggcgccccattcaccggtcaacgaaaccattgcatgttggagaagctgaatgccttctgttgacgagtgggacgcgtgattccccgccagcaggataatcatcgcgctggcggtacagatgataatggtgtcgctgaatacgccaatcatttgcacaatcccctgcgcgacagggtgagggggatacgacgttgccgctgcggccgcattaggcgttgaccccattcccgcttcattagagaacatcccacgctgaaaaccgctggtaatagcctgggtgagcgtatatccggctgcgcctgccgcggcttcctgccagccaaatgcgcttttgactatcgaggcgataacgccaggcatttgctcaatatgccagaggcaaatgaatacgctgccggcgacccacaataacgcgatgaggggaatcagccattgcatcagacgggcgacgcctttgatgccgcgaatgataattaacagggcacagaacgccagagcaatgccggagataagcggcggaatgttgaaggcgaaatggagcgcgcgtgagacggcattcgcctgcacgctattaaaaatcaacccgtaggcgacgagcagaaagagggcgaaaaccacgcccatccagcgcattcccagcccacgcgccatataccacgccgggccgccgcggaactggcctgtcgggtcacgttctttataaagctgggcaagcgaacactcggcgaaggaggtcgccatgccaatgatggccgagacccacatccagaataccgcgccgggaccgcctgcggcgatagccagcgccacgccggccaggttaccgctgccaatccgcgccgcgaggctggtacacagagcctgaaatgacgtcaggccgcctggctgcgggctaaggctgcctttcagactgcggctaaattggcgaatataacgaaactgaatgaatccggtacgccaggtaaaccaacatcctgcgccgagcagcaggtaaatcattaccgagccccagagtatttcgttaataaaactgaaaaactcaggcattaacgtccctcttgttgatgccggcacgctttgataatcctgtataagcgtgacccatgatgtagatgaccttgtcagactaatattaacggcagtttaccataaatacggtggtatcctttaattgcgcatcaaccgtcggcagatacgcaaacagtgcacaagggcagccaggtgcatgtaggcggttgcgctgtgagtgcgtcgtgttatcatcagggtagaccggttacatcccctaacaagctgtttaaagagaaactctatcatgacggacaaattgacctcccttcgtcagttcaccaccgtagtggctgataccggagatatcgcggcaatgaaactgtatcagccgcaggatgctacaactaacccttctctcattcttaacgcagcgcaaatcccggaatatcgtaagctgattgacgatgctgtcgcctgggcgaaacagcagagcagcgaccgcgcgcagcaggttgttgacgcgaccgataagctggcggtgaatattggcctggagatcctgaagctggtgccggggcgtatttctaccgaagttgacgcgcgtctgtcttatgacactgaagcgtctatcgccaaagcaaaacgtatcattaaactctacaatgatgcgggtatcagcaacgatcgtatcctgatcaagctggcgtccacctggcagggcattcgtgcagccgaacagctggaaaaagaaggcatcaactgtaacctgacgctgctgttctccttcgcgcaggcgcgtgcgtgcgccgaagcgggcgtctacctgatctcgccgttcgtaggtcgtattcttgactggtataaagccaataccgacaagaaagactatgcgccagctgaagatccgggcgtggtttccgtaacggaaatctacgagtactacaaacagcatggttacgaaaccgtcgttatgggcgcaagcttccgtaacgtaggcgaaattctggagctggcgggctgcgaccgtctgactatcgcgccggcattgctgaaagaactggcggaaagcgaaggggcgattgagcgtaagctctctttctccggcgaagtcaaagcgcgcccggaacgcattaccgaagccgagttcctgtggcagcatcaccaggaccccatggcggttgacaaactggcggatggtatccgtaagtttgcggtagaccaggaaaaactggaaaaaatgatcggcgatctgctgtaatcattaacgcgtggccctgatatgggtcacgctacctcttctgaaacctgtctgtccttcccttcgcagtgtatcattctgtttaacgagactgtttaaacggaataatcatggataccttacgtattggcttagtttctatctccgaccgcgcttcaagcggcgtttaccaggataaaggcattcctgcgcttgaggagtggctcgcttctgcgctgaccacgcctttcgaggtccaacggcgcttaattcctgatgaacaggaaattatcgagcaaacgttgtgtgaactggtcgatgagatgagctgtcatctggtgctgaccactggcggtaccggtccggcgcgtcgcgacgtcacgccggacgcgacccttgccatcgccgaccgtgaaatgccaggttttggcgagcagatgcgccagatcagcctgcgctttgtgccgaccgccattctttcccgccaggtgggcgttatccgtaaacaggcgttaattcttaatctgcctggacagccaaaatcgatcaaagaaacgctggaaggcgtaaaagcggacgatggcagcgttagcgtgccgggcatttttgcgagcgtgccgtattgcatacagctgcttgacgggccgtatgtcgaaaccgcgccggaagtggttgccgctttccgtccaaagagcgccagacgtgagaatatgtcggactgaccggaaaatactgatagtagggttattcctcccggtgcgggaggaataaaagagatttagtgcgcctcgccgattggcagaatagtgcggccaaattgctcgtttagcacttcacccatcgccagataaatagcgctggcgccgcaaaccagaccaacccagcctgcgatatggatagttgcttcgttaccggtgatattgccgaccgccagcagagcgaacagtacggtcaggctcaggaaaacaaattgcagcgcgcgggcggctttcagcgtaccgaagaacataaacagcgtgaacacgccccacagacctaaataagcgccgagtagctgagcgtcaggcgcatccgtcagacccattttcggcatcagcaggatagcgaccagcgtcagccagaacgaaccgtaagaggtaaaggccgttaaaccaaaggtattgccttttttgtactccagcagaccggcaaaaatttgcgcgataccgccgtagaaaatccccatcgccagaataataccgtccagggcgaaaaaaccggcattgtgcaggttaagcagaatggtggtcatgccgaagcccatcaggcccagcggtgccggattagccaacttagtgttgcccataattcctcaaaatcatcataattgaatggtgaaatagtttcccagaataacgagttccgtattcggggcgcggcataataatcagggggaagaggactgtctatgatctaataagggggaaaagaaaatatttcccccagtgagggcattcacgcctgaacggctgccatcattcgtcgcaggcaggctatttgcaagaccgccggaatagtcacgcgatacgcgctgccgctcatcgctttgacgccgtttaacgccgcgccgaccgggccgccaagacctgcgccgcgcagcaatccgtggcccaggatgctcattgcggcatgggtacgcaaaatgcgggtaagctgggtggaaagcaggtgggagaccccttttgccagactgcgatctttcatgagcagcggcagcagttcttccagttcagaaactttggcgtctacggcttgcagaaattcctgcttatgcgccgcgtccatcttctgccaggtatgacgtaaaaaatgctccagcagttgctgttctatttcaaacgtcgacatgcttttatctgctttgagttttagccgttttgcgacatccagcagaatcgcgcggtactgttttccgtgtccgcgcaatttgttggcgatactgtcgccgccgtaatgctgaaactcgccggcaatgagctgccagttacggcggtgttgctccgggtgaccttccatcgctttgaacagctcgttatggctaagaacgctcgacaagcgagctttgcccttttcgttatgcgtcagcaaacgggcgaaatcggcgagttgttcttcgctacaatgctgaagaaagtctaaatcctcgtcgtgtaaataggtgacgttcattttcagtctggcttttggaatagaaataacagcgattaatcgtcgccaatgactttaagtctcgccatatcggaagaatttaccgtatggcctgagaaggtaatctttgatacgcagcgtttgttgtcgttatcgctattaatattgatccagcctgttgtctggccctctttgattgaggaagggacgttcaggctttggctggcgctacgcgcagttttaaaatagacggatgcgccgctaagttcgatgtcgccgtgatccgccgtgagttgaatgcgcttcacgatgcggcagacgggaattttcagcgtgagatcgttcgtttcatttctgggcatggcaataacacccagtattttatggtcgttcgcgtgcgcgacgctacttaacgccaggccgaaaagcaggccgacggaaatcgttaacacagatcgcatggaatttctctttgacgggttcaataagcaataccgtctatcatactctgctcatggcaacgattcagttttgtaatcttttctttttattacaatttttctgtgaatggtattcgttatttaatttatttcatgaatatttatctgtctggttttccatcgtgccctctcgtcactaaaaaattttttcatctcccccttgatgacgtgggttacgaccccatcttgtagtcaaccgcagtggtgagtctgaaaaaaaacgattcagggtagttgaaaccgcacgtttcgcccttattacagattcacaaccacatgatgaccgaatttttagtggagacgtttagatgggtaaaattattggtatcgacctgggtactaccaactcttgtgtagcgattatggatggaacgcaggcacgcgtgctggagaacgccgagggcgatcgcactacgccttctatcattgcttatacccaggatggtgaaactctggttggtcagccggctaaacgtcaggcagtgacaaacccgcaaaacaccctgtttgcgattaaacgcctgattggccgccgcttccaggacgaagaagttcaacgtgacgtttctatcatgccgtacaaaatcatcggcgccgacaacggcgacgcatggcttgatgtgaaaggtcagaaaatggcgccgccgcagatttctgccgaagtgctgaagaaaatgaagaaaacggctgaagattatctgggcgaaccggtaactgaagcggttatcaccgtaccggcttactttaacgatgcgcagcgtcaggcaaccaaagatgctggtcgtatcgcggggctggaagttaaacgtatcatcaacgaaccgactgccgcagcgctggcttacggtctggataaagaagtcggcaaccgtactatcgcggtttacgacctcggtggtggtactttcgatatctctattatcgaaatcgacgaagttgatggcgaaaaaacctttgaagttctggcaaccaacggtgatacccacctgggtggtgaagacttcgatacccgcctgatcaactacctcgttgacgagtttaagaaagatcagggcattgacctgcgtaacgatccgctggccatgcagcgcctgaaagaagccgcagaaaaagccaaaatcgagctgtcttctgcgcagcagaccgacgtgaacctgccgtacattaccgcagatgccaccggtccgaaacacatgaacatcaaagtgactcgtgcgaaactggaaagcctggttgaagatctggtgaaccgttctatcgagccgctgaaagtcgcactgcaggacgctggcctgtccgtgtctgatatcaacgacgtgatcctcgttggcggtcagacccgtatgccaatggtgcagaaaaaagtggctgagttctttggtaaagagccgcgtaaagacgttaacccggacgaagctgtggctatcggcgcagcggtacagggcggcgtgttgaccggtgatgtgaaagacgtactgctgctggacgttaccccgctgtctctgggtatcgaaacgatgggtggcgtgatgactccgcttatcaccaaaaacaccaccatcccgaccaagcacagccaggtgttctctactgcggaagacaaccagtctgcggtaaccatccatgtgctgcagggtgagcgtaagcgtgcgtctgataacaaatctctgggtcagttcaacctggatggcatcaacccggcgccgcgcggtatgccgcagatcgaagtcaccttcgatatcgatgctgacggtatcctgcacgtctccgcgaaagataaaaatagcggtaaagagcagaagatcactatcaaggcgtcttctggtctgaacgaggaagaaattcagaaaatggttcgcgatgcagaagcgaacgctgaatccgaccgtaagttcgaagagctggttcagacccgtaaccagggcgaccatctgctgcacagcacccgtaagcaggttgaagaagcaggcgataaactgccggctgatgacaaaaccgctatcgagtctgccctgaacgcgctggaaactgccctgaaaggcgaagataaagccgctatcgaagcgaaaatgcaggaactggcgcaggtttcccagaaactgatggaaatcgctcagcagcaacatgcgcagcagcaggctggctccgctgacgcttctgcaaacaacgcgaaagatgacgacgttgtcgacgctgagtttgaagaagtaaaagataaaaaataatcgccctttgaacgggtaattactggcacgggcgaagaggtttcctctccgcccgtgtatgcatgttaagggcagataaaaagagatggcgaaaagagattactacgagattttaggcgtttccaaaacagcggaagagcgtgaaatcaaaaaggcgtataagcgcctggccatgaaatatcatccggaccgcaatcagggtgataaagaggccgaagctaagtttaaagagattaaagaagcctacgaagtgctgaccgatgcgcaaaaacgcgcagcctacgatcagtatggtcacgccgcgtttgaacaaggcggtatgggcggcggatttggcggcggctttaatggcggcgctgatttcagtgatatctttggtgacgtttttggcgatatctttggcggcgggcgtggtcgccaacgtgcggcgcgtggggctgatttgcgttataacatggatctcaccctggaagaagcggtgcgtggcgtgaccaaagagatccgtattccgacgctggaggagtgcgacgtttgccacggcagcggcgcgaaagctggcacgcaaccgcaaacctgtccgacctgtcatggttctggtcaggtacagatgcgccagggattctttgctgtacagcagacctgcccacactgtcagggacgcggtacgctgatcaaagatccgtgccataaatgtcacggtcatgggcgtgttgaaaagagtaaaactctgtccgttaaaatcccggcgggcgtggataccggcgatcgtattcgtctggcaggcgagggcgaagcgggcgagcatggcgcaccggcaggcgacttgtacgttcaggtccaggtgaaacaacaccctattttcgagcgtgaaggcaataatctttattgcgaagtgccgatcaactttgcgatggcggcgctcggcggtgaaattgaagtgccgacgttagatggtcgcgtgatgctgaaagtaccgagcgaaacacaaacgggcaagctgttccgtatgcgcggcaaaggcgtgaagtccgtacgcggtggcgcgcagggcgatttgctgtgccgtgtggtagttgaaacgccggtcggtctgagcgaaaaacagaagcaattgctaaaagatcttcaggaaagttttggcggcccgacgggagagaaaaacagcccgcgttcaaaaagcttctttgacggcgtgaaaaaattctttgacgatttgactcgctaatcttttcccgttgtatttttcttcagcccgggtgtatatccgggcttttttctgcctgtacgcgcccaggcttctgttaaacgcatcgtatcctctcatttgttgatattttgtttttactgataaacaaattgatgttaatcagcagttttgtatacgcttattctttaaaaaaacgtgatgtgatgacattaatgattgcttttttagatgctgtgaattgatttatcttgagtattatctatattgctttttttagtttccggaggcagacagcgaatgggatcgaaaggtgccaacaagagctttgattataatttaatcaaaattcttgacgctgttattttgtcaggaaatgcggctatggcggcaaaaaagttaggcattacaccggctgccgtttctctggcgttaaagcgcctgcagagttattacccggaggaactgtttagcagagggaaaggcgggctcatccccacagctaaggctgtcgacattcaccaaaatttcagtcaggtgatgaaactggtggatgatacatttctctgtaatagcaaaaaagatgaagcgttccagataacgttattaggcagtgatattgttgaaagctattatctttctcagctctataacagcgatatatttgaccgtattttgataaatcatttctccgtaagaaatatgagtcgggagcatatcagcgaacttctgtttactgcgcaaggcgatctgttgattagtgccgaacctttgctggagtccggcatagagaatcaaatcattgatagttttaaatcatttgtttgtatctgcagcagtaaacacatgctgagtaccctctcacaactgtcgctacatcatttttattcttcgcgtcatgcgttatatcagccggggatgggggcttcagtgatatatcatgatagcgaattatttaaggatgatctttactatactggcaggcgtattgtcggctatcgcagtgattcgcttaacggtttgatgagcatgatcgaacgaacctcattgattgcattgatgcctttgaaattagcgcttttttataaaaatcatcgtaaatatgacattaaatttattcagcctccgcccgaactggctttgaagtcagttcaggtctatgcatcctggaataaaaatagtagaaatatatcgacgattaatgagatggtaagtatgttacaaacactttcctccttccgtcgctaatacacctcatttttacgctttgatttaatatggttttaaatgatgtgctttgatttttaccctcctgacagggcgcttacactccttgtgttaattattcatttataatgatttcggagtgttaaaatgtctattcccaaccatgtgtcgacaacggaagttgtgctattggagctagagatcttactcactattatttcgattggcgcgtggggaggctttgtcagctatcttttacgcaaagataagacagaatataatagttctcatgaaagtattaaatattgcttaacgcagatcgtgatttcctgcttcaccagtttcttgttaagcgcgattgcgatcgaaaaagaatgcagtttcaacattgttctgttggcggcaggcttaggcggtgttttcgcgagtccgatcttaaagattcttgggcggcggattaaaaaaattatcgaaggtaataattcagattaattatcatttgcagtatcaggctcatccgtgagccttttacgcgtcttttttcagcctggtctaggtcactctattcttgatccagccataaataaattgttcgttattgtggtttttctcagcaacgtttaagtagtacgtgccctgactgcaattgagggctttcaccaaaacggcttccccttcctggcctcgccaggccaaataatgttcgagagcggcaagcgtccgcgggccaatattgccatccacatgaatatccgggtagcgtttaccttcgtgattaaagacgttcaaccagcgttgcagccacgcgctggggtggtaagcgcctatgttgactgccgcatcgcacagctcgaaggagactggccacgatagcgtcgagatgacgtcaaaacctggttttatccagtaatcctcttcgagaatcgcgtaggcttcagcgtgggtcagatcccgcatatcgccagcatagccatgcgctcgcgccgtggcttcggtaatgccccaatgggtggcgccgcctttatctttagggttaaatacgtaaccgccttcaagcgcaataattccatctataattggattcatcttccctttccttcgcttagtgaatatgcagatacatgagagaacctaacgttactgaaaatacggtcgtcagggcggcgatggtttgccgtacaatctgtttttttcttccctttgtttcgctatccgtcgcgataatggtgatatcactattaactttgaggccttgtcttggaatggtaataaaaagatcgttaataccaagcgctttaaggtcacgtctgattaaatagagaatctgcgttagatttgcatcattaacataatggcttcgacttccccataacgcagtggttattttttgtcgctcgataatctccagatgagcattctcgatgatgaaactgagacatttggctctcatcgcagtcattttaataacctgtgaatttgagaccgtcctcagtttatatttaccttcattgtaaatgcaattgctattaatgatataagttttcataacgtcttcctttagaaatgtacatcctggttgtctgtggtgactatattgtatgagaaatgtcttaatccaataaatgtcactggttttattgtattgtcattgtctatagcgagtgtaatcacattatttcattgtaattaaatgatatttaattacatgataaatgatatttactatgttctcaccagaacggagtaagcgggcgctgagaggtgttgttttctcttcgttagacggtgttgttaacctcatttttatgatttttatatcatctaaaaagatgatgttttgtgattagctattttttatgcctgtaacgattatggaccccgcagaacgagctgcgacaattttgaaacgtaaaaggaaatttgaaaatggctacaagcaaactgattcaaggcgatacaattactgaaactactcatgcagcgaatggttttgaccctgcaacaagcgatgataaaataagctatacttccgctcgtgttgcgaaaccggtatacaataaatataaaaattccacgactaaaccgaaggtattcggttattacaccgactggtcacagtatgacagccgtctgcaaggcaatatgtcccaaccgggccgtggttatgatttaaccaaagtttcaccgacggcttatgacaaactgatttttggctttgttggcatcaccggtttcagaaaaattgatacagaagaccgcgatgtcgtagcagaagcggcagcgctgtgcggcaaagtgaaatatgagccgaccttcctcgacccatggggcgacttccagtcttatatcaacctcggctttgatgtcagcggctgggatgtggatccgaagactgtaactcagtctaacgccaagggtctgctgggcgcgctgcgtgatatgcaggcaaaagcgaaagccgcaggtcacacgctggcgctctccatgagtatcggcggctggagcatgagtaacgggttccacgaaaccgccgcttctgactcttctcgtaaaatcttcgccaaaggcgtggtgaaactgttcaaacagttcccgatgttcagcgaagtggatattgactgggaatacccgaacaatgaaggggcgggcaacccgtttggtccggaagatggcgctaactacgcgctgctgattgccgaactgcgtaaacagctggattccgcgggtctgagcaatgtgaagatctctattgccgcttctgctgtcactactatttttgactatgcgaaagtaaaagatctgatggctgccggcctgtatggcatcaacctgatgacctatgactttttcggtacgccgtgggcggaaacgctgggccaccacaccaaccgcaaagcgctggaagagggcggctgggctgtcgaaactatcgttgatcacctgctggcagaaggtttctccgctgaccgtatcaacatcggttatgccggctatacccgtaacgctcgtcaggtagaaattgaatccctgtcgccgctgaaaggttcttacaacccaggttcaggccctactaccggttccttcgaatccggcaccagcgaatggtatgacgtcatttatagctacctggatctggaaaaccagaaaggccgtaacggtttcaacgtttacaccgaccaggtcgctgatgctgactacctgtatagcccggaatccaaactgtttttatccctggatacgccgcgtactgtcaaagcaaaaggcgaatatgcagcgaaactgggcctgggcggcgtgtttacctggactatcgatcaggacaacggcgtgctggttaacgccgtgcgtgaaggtctgggttatgaaatcgaatctgaagttatcgatatggaaccgttctactttgaaggtatcaatgtagaaaaagatgaagagcagagcgacagcgacgacgcgcagaaggtcaaccacgcgccgaaagcggcgattgaactgatggttgtaggcggatctacggtacagctgtctggcgcaggttcttctgatgaagataacgatgagttgtcctttagctggggcgtgccttctcaaatcgatgtggcagacaaaacggcagaaatcattgaggttgtggtaccggaagttagcgaaaaaacagcctttcagttcaccctgtttgtacgcgactgctacaacgaaccgtcctctcaacagcgctttgttctgacggctgtgcctgcgctatctcaggttcaaccggaaccggaagaggaagaagagattatcgttcctgtaccggacgaggaagaagataccacgccggctgaggatgatacgccagcagatgacaaaacgtcaccttacgcgcagtgggatgcttctaccgtttatggcgcaaactggggttctttcgaaatcgttagctggaaaggccataactatcaggtgaaatggtggtctatgggcaaccagcctgacctgaactgcggtgtcggcggtgcatggaccgatcttggcgcttactaatacacggtattaagccgatgtattgggcttcatgattcaagccctggtttaccggggcttttctccaccagggacagaggaagagtagaccatgaccatttccattcacgccagcgcatttgacgtcaacagctggtatcaaaaaattaccttaactttcatcaatgagagcggtaatgcggtcgatatgaaccatgccgcaatatcattcacggcttccgggcacatcgatccatggggaaatagcggcggtacgctcaaagggaacctgccgcttacgctgaatgagagttcgtatggcacgctggaaactaacaacatcatcattaataacagcgatgcattacttcttcagccgggcgaacgcgggacgctctctttcagcctcgcggcgacgcaggtgccggtaaaaatgtccgccatcaccttgacgctggcgtcatcgtcatccgaagacgcagagtctgcaaccccatccgatcaggagacgccagcgatacccgccgcagacgaacaacccgccgaacccgatgtgccggaaaaggacaatgaccttcaggaacacggccttacgcttaacgttagcgagttgaataccgcaagttggtatcaacgcgtcacctttacgctgaccaacctctacgcccaggcggtagatctcaatcagcttcaactgaattttacggccagcgcgcaccccgatccctacagtccgtttcagggaacaatgttggggaatcaggccgtgacgctggccagcgatgggggatggcccatcgagaagaataccatcaccattaatcatgacggcgcgctgatactggcggcgggggataccgccgaattacagtgctatctggccgccacgcagacgccagttgccatcagcgatttgaacgcgacgttggcccatgatcctgcccgtcagggaaaagtttgcgttcattttcctgccatgacgcagaccgtggcgctcaaaccggtgattgagctgctgtttcctgccggcgaaacccggcgctttgtcggtgagtggggcgaggttctgacaataggcgatcttagcgcaggaacgtatcggcttaccgtaccggtactggcgaatgatgagatgcaaatcgcgccagtcgagtcctcttttaccgttacgctgcaatccggcgatgccgccgcgcaggtccaggtatcctgtctgccgattgtccgttatgccagcgcgcgtctgatgattgacgcccctgcgcttggtaatgcgaaattgaccgttgagatcgccgatgctacgcaagcggatgagcgtaccgtcacgctgatcgccaaccaaccgcagttaatcacccggctactggcggggcatcattatacggtcaatctgcagcctgcgatgattaataaccgctttatatcggcacccatacagcttacggggtttatccctgctgcggcgcagattgccgaggttgctgtcgcttaccaacagtcggcgctcgacacggcgagtttcgtgacggtggatgccactatactgggcctgcccgatggcgtcgcgccgcagcgttatctgttcagcagcggtaaatatcagtactcattaatgctggagagcggcagcgatcggcagacgttggcattacgctttgcacccgggctgtatgatgttcagacggacgacattttcatcgacagtgtgccgtggcgttgtgaacaggccgggccgctacggttgttgcaaaaggtcaaccatgtggcgctggagtttctgcccggcgtgacgctacaggtaaaaggttggcctgattaccttgctcatggcggcgtgacggttaacgcgccagagacggtttctctttatcgcgatataccgtttagcgcgttgtttaaatacgatggttttgacggcggcggcgatccggttccggccgcggaggttgacgtgaacggggatggttttctggattacgcgacgttaccgatccataaaaccgttgcgctggtgcgccagatagaaaaagaagccgggcgtagcgtcatgccggtaatggtcatttataccgcgaatgccagcggcggtagcgcgctggcggatttacaggatgcgcaaaagctacgtaaccattttggtaactttattacccagtgtctggcggcgcagtcatacaaagatgagacgcatcctgtcccggccacctttgtgcttaacccggattttctcggggcactacagcaaggaccgtatggctataccgtagtacggcaaaaaaacagtgtgccggtgaatgcccaactggcggcggcgatacaagcattaccggcgatggctggctttatcgcgccttcgttgccgacgtttagcgacgatctctacggctatattcaggcggtgaactatcttgttcgtcagtttgccccggatgtggcttttggctggcagacgaatgtctgggcgacaggaacggcggactgggtgctgcgcgataccgctgatccggtagctgaagggcaggcgatcgccggatttattcatgaactgggcgtttacagcggagaatatgcgccggactttattgcgtttgataaatttgagtgtgactgtttcagtcctgatgcgcttgcccactatggctggaatgcgacatgctggcttaattacctggcgatggtcaaacaggtgacgaaagcgctgctgacgcccgccatgctgtggcaaatcccaggcggccatatgcctacagtagaagagggcgtcagtaaaatcagcgctgcgcactttgcatccggcggaaccttttttatgggtgacgcccgcattggcagcgatcctgacacgctctctttgcagctactcaatacggccttaaatagcgcgacttacggcgtcccgaccgtcggcgactttttacgtaaagataaagggtatgactggggccaaatgcaggcgctgaacctaccggactttaacgtcttttcgatcttatggggcggtggttctactatcagtattacgacaatccattctaacggtgaagacggcggctggctggcggataaaatggtagagtattatgctgcccctcgctatttcagataatatcactgcttatttgcattaatctggactattagtttgagattcgaaggcgcgttctttcgaatctcttttcctgcgccccctgacctctcattctttatgcgtaatttgttattaattttctgtaatcattttgtattaagaattgtcttaatcttaaaaatattgcgtattagtgcgttgtgaatacagaaatactgcatagcgatgttatttattattaatttaagtactttttgagaggttatactgtgacgctacattgagtagacaaccgttaatgaaaaaaatgatgaacgacgcttttgctaaagataataatgagaattcattacactcttttcttttttctcagcaggctaaacctcacgcggcaattgatgccttattttcggccttgttgccatttggtcaaccgtttacgctgggtatcggcgatgagttttatttacaggcaaacgatgaacactacattgtattactggagtcaggcgttgtttctttctgtcatgatgacaaacgactccatatatcttcatcgtttgcgccatcggtcgtgggtatggttgacagctatggcgctacctataacgtccccgcgcgaccggaacactttttgctcgcagaaacggtttgtaccggtagatttgttcgcctgccggattttataaaaatcgccgatgaatgcgatttgtggcacgacgtggcccgttgtctggcttaccgtctgatggtgatgagcgcgcgcgatcgtgaattagtcggcgtcgattcttatctgaaagttcgggcgctgctgactgaaatctgggcttatccacaggcctaccgggaaagcattatcgtgttgaattttattcaacggcgtaccgggatatcgcgcagtcggaccatgaagattctgtctgaactaaaaaaaggcgggtatatccatattgataatgggcggctgacggcgctcggaaaactgccagtggcgtattaatgcactatccgcaacgatatatttacatatctcgactgaatttgcctggtatcgttaatagaatgttttactgaaggttgttatgaaagctatttttaaaaagtcaatatggctaaaggagataggccgaacgactggtgtaaagttaatataaaacaacaggttatgcctggtcctataaaaccaaatgtcgatgattgcaacttgccgttggcttgctaataattaataacatcgttatctcattataacgtaaagataaactcacgacgttgagtggctgttttattgcttctgacatttatatcagaacaagaagacactttttttcgcataagaaaaagtcgtgatattgctgtgaagaaatatcagcagccgtttcgttaaaaaatctgattacccttatttttatatttaaaaggagcttgaatgaaaaagcctgtactagcattaatggtctctgccattgcctttggcggaatgttgtccaccgcgcaagcggatactacaaccgtcactggcggtacggtaaattttgtcggacaggtcgttgacgccgcctgttctgtttccgctgactctgtcgatcagaccgtgacattaggccaggttcgcgccagtaaattaaccgaggccggtatggtggcgaatcaaaaagaagatttcaccatcaaactggaagactgcgatactcagaccagccagaatgcggcggtgatttttaatggccaacaggacgcaaaccagccggggtcgctggcgaataccgctggggcaggttcggcgacgaatgtggcattacaactttatggaccagatggccaggcgctgaatatcggtgaatcgtccagtactgttaccttgaatgatggcgaaaacgttattccgcttagcgtggattatatcgctaccggtacggcgactgccggtaatgttaccgcgacggcgacatttagcatggtttattcctgattccttatcgggatttttttctcgtctgttgggaggcgagaaaggggcgttacgcgcgtcactgcgcgtaacaaaccgacggcatcaggatattacgcagatgaaaaaaaacgtaccgattttccttcgattattgctactgctgtcggcggccggcctgtcgtttgccgcgcaggcgggaggcattgcgctgggcgcgaccagggtgatttatccgcagggaagtaagcaaacctccttgccgattattaattcttctgccagcaatgtttttttaattcagtcatgggtcgccaatgccgatggttcacgctcgacggattttatcattacgccgcctctctttgtgatccagcctaaaaaagaaaatatattacgtattatgtatgtcgggccgtcattaccgaccgatcgcgaaagcgtattttatttaaacagtaaagcgataccctctgtcgataaaaataaattgaccggcaactccctgcaaattgcgacgcaaagcgtgattaagctatttatccgcccgaaaaatctggcggaggcgccagctcatgccccgtcgacgcttcgctgccgtaacgagcgcggccagctaacgattactaacccttcgccgtactacgtttcgatggttgaactgtatagcgcggggaaaaaactgccgaatactatggtaccgccgaaaggcgcgatcactctcccggcgacgcccggccaggtatctttgcgcacggtaaacgattttggcgcaacgacgccagcacgcgtttgtccagcttcatgatgttatgcgtaatcagcttttcatgacgcgatattactccagcgtaactaaacccgtattaaccccgctggcgttggctatcgcactggcgcctgcgccggggtgggcggaaaactatttcaacccggcatttctgtctgacgacccgtctgcggtggccgacctatcgaccttttcccgtaatgcccaggcggcggggatgtatcgcgttgacgtttacctgaacaatacgtttctcgcaaccagagacattgccttccaggcggtgaaaacgacgggaaaaagcgcgcccaccgatgacagcggattacgcgcctgcctgacgcctgaaatgcttaaaaatatgggggtaaacaccggggcgtttccactgttggcgaaggcggcggcgggaagttgcccggatctcgccagtgcgataccggccgcccggacccgctttgattttgcgcagcaacgtctcgacattagcatcccgcaggcggcgatggttgccagcgccagaggctatatcccaccgaaatactgggatgaaggtattaatgcgttgctattgaattacacctttaccggcgcgaatagtcaggatcggagcccaggcggcagtgcggagaacagctattttcttggattgaatagcggccttaatctgggggcctggcggttacgcgactactccacatggaacgcgaatagcggcgatcagaatagcgacagcgactggcagcacatcagtacttatctggaacgtgatgtggtctttttgcagggagaactgacggcaggcgatagttataccccctccgcattattcgacagccttccttttcgcgggctacaactggcgtctgacgacaatatgttgccagacagcatgaagggcttcgcaccgaccattcacggcattgccagaagcaacgcgcaagtgaccattcggcaaaacggctacatcattaatcagcgctatgtgccgcccggggcatttactattaatgatctctatcctaccgccgccagcggcgatttgactgtggaagtcaaagagtccgacggttctattaatcgttataacgtgccctattccgccgtgccgattctacaacgagaagggcggctgaagtatgcggcgacggtggcggagtatcgcagcgatagtagtcaaaaagagaaggtgaaattcagtcaggcgaccttgatatgggggttaccgcatggttttacgctgtatggcggaacacaactttccagtcattatcacgcgctggcgatcggcagcggcgcaaatctgggcgactggggcgcggtgtcgctggatgtcacccaggctaccagtacgctggcggataataacacctaccaggggcaatcgctgcgtttcctgtatgccaaatcgcttgcacagtcaggaaccaatttacagcttatgggctatcgctattcaacctcgggcttttacacgttggatgataccacgtggaaacggatgagcggctatgacgatgacagtcggactgacagcgataaaagcaggccggaatgggcggattattacaacctttattacaccaggagggggaaagtacaactcgatatcaatcaacagctaggcgggttgggatcgctttttattaccggcagccagcaaagttactggcacactgatgaaaaggattctttgttgcaggtgggatacagcgatacgctggcgggtattgcatggagcgtttcttacaacaataacaaatccgcaggcgatgcggagcgcgatcaaattttcgcgctgaatatctcggtgccgctaagtcaatggctgcaacacggtgatgaggtcacgcgccatcacaatgtttacgctacctttagcaccagtacggacaaacagcataacgttacgcagaatgcgggccttagcggcacactgctggacgaaaacaatcttagttacaacatacagcaaggttatcagaatcacggtattggcgaaagcggcgccgctagcctggaatacgatggcgcgaaaggcaacgccaatattggctataacgttagcgataacggcgattaccagcaggtgaattatggcctgagtggcggcctggtggcgcacgcgcatggagtgacgctaagccagccgttaggcaataccaatattttgattgccgcgccgggcgcagccaatgtcggcgttgtcgaccagccgggtattcatacggacgcgcgtggctatgcggtggtgccgtatgcgacaacatatcgccaaaaccgtatggcgctggacgttaacgccatggcggatgatgtcgatattgatgacgcggtgactcgcgttgtgccgaccgaaggcgcgctggttctggcccgctttaaagcgcgggtcggcgcgcgtgccctggtaacgctgaatcataacggtaagcctgtaccctttggcgcaacggtgacggtgaatgatcgccatgcggaggcgattgttgacgaggccggggaggtctatctttccgggttgtcagcgcaaggcgttctgcacgttcgctgggggaacctaccggatcaacagtgcgtcgcgtcctatcatctctcttcctcccgtcagattctgagtcgacaacatgcggagtgtcattaaatgaaaatacctcttttatttgctctgctggcgggaagtgtcgtatcgcagtacgccttcgcagacgtgtgtaaaaacgttaacggcgtgccttccagtattaattacgatttaacgaccactctgacggcagaacaaaaccaggtgggaaagacggttcaactggaaaaaagccaggaagttaatgtacaggcggtgtgtcccgccggcgcgtcgacctatagccagacttatcgctcctatgtgtcgccatatccggtcgtagaaacgagcggtaactggaaatatttaaagctggacccggactaccttgaaggcggaatgcgaattgaggattcttcggcgggcgatatctatccgccaatgaacaatgtcctgatgggatatgatgaaaatgtgaaagcgggtcaaccgttttacgttcgtgactcaaatctggagtttcagctcaaaattgttaaaccgttcgtcggcacggtgaatattagtcctaagactatgtttaatgtttatgtcatgaccgccgcaggcgatccgctgacagatgtcgtgtacagcattctttatagtggaacggtgaccgtaccgcaaagctgtgaaatcaacgccggacaaacgattctggtaaatttcggcgcattatacagcggcaatttcaaccatgcaggccaaaagccggagggggtacgagcgaaaaaattcagcgtaccggtaaagtgcagcggtctggattcgcaggtcaatttaacaatgcgtcttatcgctacgccggatagccacgttccccaggctatcgcttcggataatgccgatgtcggcgtagtggtcgaaaccgatgaaggaaacgcgcttatccccaatgatgtacagagcgtcgcgccttttatcaccgatagcgccggacgcgctaacatcacattgcaggcctacccggtaagtacaacaggcgaaacgcctgcggaaggggcatttaccgcactggccagcctgcgagtggactttgactaaatgaacagatcacactgcgctctttttgccatgggactgatgctgtgtccacaaatcaatgccagcgctgacgacctcgcttataacctcgaatttaccggcactattgtggcgcaaacctgcgacatagatatttccagtctcagtcaaagtattgatttagggcagtttgcagttggcgatttcccctcgacgggaacaacgacaaaatttaagccctttaatatcaacctcaaaaattgttcccgaggaattaccggggcgaagatctggtttaccggcgaacccgatccggacaatcccgcgctactggcgataaccgacaccgggatgggaagcggaaacatgttagcaagcggggttggggtggaaattctgaatgatgatcaggataccatcagtatcaataatgccgactcggtggtctatccgttgaaagccggacgcaacacgctgtctttttatattcgctataaatcgacccggccgacggtcacgtccgggaacgcgacggcggtcatgtatttcgatatgcagtatgaatgaggagccatcgtaattatgcgtaacgatatcctgtacggcatcgggatgctgctggcggcatccggcgtccaggcgcacgatggccgggtctatgtttccggaaccatcacggacaatacgtgttcgctctctcctggctcggaaaatattaacgtggcgatgggcgcggtttctcaacggcagttttatcgcgcaggcgacggttccgcatggcaaccttttgctatcgatttacaaaactgcggcagcactgccagcggcgtaacggtcagttttagcggtgcggcggacagccgtaatacggatttattggcgcttaccgcaggggaaagcgacgcttcaggcattgggattgcgctttatgatcaaaataaaactttaatcccactggggcaagagagtgatgtggtgacgctcagtccgggtcaggcgtcggcgcatctgcaattttacgcgcgttatcttgccgatggcggcgcggtaacgcccggggacgccaatgcctccgcaaccttcattcttgcctatgaataagttctttttacgctgcgcgatatattggtgcttgcttcccatatcatgggcgcaggctggcgtggtaattggcggtactcgctttatctatcatgcgggcgccccggcattaagcgtaccggtaagtaaccgttcagaagcgtcctggttaattgatacgcatattttacctggtggccgctggccaggaaccaaaaacgaagggaatatcatgcccttcgtggtcacgccgccattatttatgctttcagcgcgccaggaaaactcaatgcgggtggtttataccggcgcaccgctacccgccgacagggaaagtctgtttaccttgagtatcgccgctattccctccggtaaaccggaagcgaaccgtgtacaaatggcgtttcgttcggctttaaaattgctctatcgccctgatggactcgccggcaatccgcagcaggcctaccggcatctgatctggtcgcttacccccgatggcgcgacggtacgcaatcctacaccctattacgttacgctctttttattacgtgctaacgagcgcgcccaggacaacgccggggtcgtggctccctttgcaacgcgtcaaacggactggtgccggcacacggttcgctgcactgtgcgctggcaaagtattaatgactatgggcgggtaatgccagcgcaaaccgtggatctgacgcgtattcattaacctatttttcaggcgtctcccgatagcgggaggctttccgaacttatcgaacgagacttttattatgtattatcacgcgttaaaactttcccgactggcgatgttgacgttggcaggcgttgccgtatccgcctcggcaatcgccgccgattctgccccgacgtcgcaaattggtccgacggcggaagcctacatcgtcagtcatccggataaagtgggagaggtcgtggcaacgtatttggccgaacatccggaatttttggtcgccgccagcgagacgttgcatcagcgtcagcagattgcgcaacaacaggcgtatgttcaactggcattacagtatcgtgctgagttgctcagtagcagcagtccttccgttgggcccaacgaggcaaaagcggcggtggtgatgttctttgattaccagtgctcgtggtgcagcaaaatggcgcctgtggtcgaaaacctgattaaggcgaacccggatacccggtttattttcaaagagtttcctattttttcctcccgctggccggtatccggactggcggccagagtcggcgaacaggtatggcttacacagggcggggcgaaatatctcgactggcataatgcgctttatgccacagggaaggtggaaggcgcgttaacggaacacgatgtctacaccctggcgcaacattatctaacgccgacgcagctggccgccgtaaaagaagcgcaaagcagcggtgcagtacatgatgcgctcctcactaaccaggcactggcgcagcatatggactttagcggcacgcctgcttttgtcgtcatgcctcagacgcaagacggtgatgtaaaacgggtgaccgtgatcccgggaagcacgactcaggatatgttgcaaatggcgattcagaaagcgaaggggtgatattcgctcagaggagaacgcacaggagtgaaagtaaaatgaagtctatgcgttgcgtcataccggtgattttactttcctttatcgttcatgaagggacagcgaaaccgaccgctcagattcattttatgggatcggttgttgaggcaggctgctggaatgacgtaggaaccttagaaattcaatgccataataaagagggagttgaacgttatattattgtcgagaatattatcacgccgatatcgtctcctcatgcaacggtaaaacgagattatttggatgaagataagcaattaacagtgctacgcattgtctatgactgaaccgcgtagcagaccgcagatggtgtcccgtcagtgtcgtgtgagaatattatgaaaaatgttctcaccttcccgggacacggtctacagactttatcttcagataaacggcgctaaaaagaaaagcacgaacaataaaaaaagagtgggaataccaatagatataattttattacatcggtgagtatgatattgaatagcttgtggcggtatgtcagcagcgtcaatgataaatctttcatcgatttttatcccctgcctggggagcgtaacgaacagttcgaaaagcccgatttgttgtaaatctcgtcgcagcagataaagaagttgcgtcaaattagcatcgctaacaaattgacttcgctctccccaaactgcgtgtgaaatcatctcccgcgtaatcagtttcttgtaggcattttcaaaaagatagcttaaacaacgcgcacgcattagcgtcacctttagcacttttttatcatgtaatgatattatttctcttaacgactcattataaataaattcgttattaatagtatattgtctcatgaattcactccgttttgatattcataaggtacgtttcacactgtcagtgtgttcactggcggtaaagtactccttacatcagtacggataagcgtagagaaccgcaaagaaataagagaatcatttatgattaaacgggataatattatgcttttttacttttttataaagtgtgccagatatttttgatgttttttataaaatagcatcatgtgtttttattttacacaggctgaaatgatatcaataaaattataatttaataacaaacagatagaggaaatgatttacttattgaaataagtgtggtgcaaggttaatctgcgccttaaatgatggtgccagattataccagccaggataacctatatgcggccaataaaaaatgctaaaaaaattgactacaatctgatcaaagtgttcgatacggttattactgaaggaaatgcaaccagggcggcgaggaaactggatgtcacgcctgcggcgatctctcaggctcttcttcgtttacaaaatctttatggcgaagagttatttatcagaacccgcaaaggattagttccgtccagcaaaggtaaatcgcttcaccaggtatttcgccaggcaattgaatctatagaaagcacactgtgcgataaaacagatgctcaggagagtaatgaactcattgttctgggaggtgatatcactgaaaattactattttccggcattgctggatactgtgttgatgaatcgatatattattaaacactatgcgattaaaaaaacaggggaatactcaccagcctccatgctgacgcatggctatgcggatgtcatcatgggaattctggaaattaagaatgagatgatcgaaagttatcttattgataatttatctgattttgtttgtgtttgtggtgaaaaaagtccattggttgggcttgaaaaaatgtctttatataatttttatgctgccagacatgctgtctatcattcagatatgttctcttctttcaccgctgatagcattgatttattcaagagcagtacgccttatgcggggcgcagggaaataggttattatagtgattcactatttggcgttatcggtattgttgaaaaaagcgatatggttgcgattttgccaggaaagattgctacttattttagagatgtgcggcgttataatataaaaatactacgtatgcctgatgaaatgatttttcgtacgttacccgtttatgcttatctggctacaaacagcacccattataaaaatgtcaaaaaactgatatcaacatttcagtcgacctttctttttagccaggaaaagcagcctgacgctttggttgaaggaagcacatccttatgcgatttgtcggtttaatatcaaattatcgtattaaataaataaccattatgaccatggtcagtaaagcgaaaaataatgccatatatttatactcttctttttttaaagaagaggggaggcagcttttgttttcattgctgataataatgttagcatctactttaatacccgttcgaggcaccgtggaaaaaaactggctcaggccaaagcctttaaggtcgcgccgcagtagatataatatctgggtcaggttggcgtcgctgataaattgacttctttccccccaaagttcattagtgagttgttttttataaataatctcttgttgtgcatgattcagcatatattccagacactttatgcgcattgcggcaatttttatcatctttcccgtttttatgttttttagctcattggtcttatcattgtaagtgtgcgtgctgttaattaaataaatagtcatgatgttatttaatgggtttaattagggtggcgataataatatgcatattaaatttatggatcaactggtgtgattgtaatagcgtcttttttccagagaaaatcgtatcgtgtcacaaaaatgatggttttttagaaaaactaaaattttatttttagtcgctctaaaaataaaatgatagtagtgttaatttttatcagtatattgatatgctttgattgatttattgttgacataaaataatttgaattatggcgcaaggcctatgccaaccataaaaaaggtataggctattggtcacaatgcattaatgctacataattgttatgcttttatagtagcgccagggaaataaaatcttcggacgataaagaatagttttagtctgggtgttattttatggatgttttattttaaattattaaaccgatttctcttgttgacgtagggttatttgctaagcaacgggctggcatgttgtagccgctcgttgcctatatcccaattaatcaggagaaacgtatgaataagaaaagttcgtcaatggttaacatgcccgcaccgcgtgagccgattaaccagaaaatcgataccaataacgcactggttttaaaccataacgccatatatgaacaacgattagcggagatcacgcaatctaatacctgtgacaaggccattgtcaccgtaaatccctacgggaccgccccgttgagtctctatctgggggtttggatggatgaagctgccgcgcttgagatcaatgttgttgatagcgaagcgacgacagaggaagtgcgttatcaatatgatgtacatccgggcgctaaccttattcctgtgtgtgggatggtatccgcggtgaataatcagattaccctacgccttgcctcgcaaattgtcgggcaatatacagtaatgacagacgcattaccgcccacggattcggctaacgtgagcctcggcttccctattattagcgtctcctgtcctgcgcagcaggcctcgctgatggaggaaggactttatttctccacttattttgatcggtataatctggcttttgatcataacgggattgtccggtggtatgtaagtcaggaaatcccttcttataattttgtcagaatggataacggccatttcctggcgacgtcacagggaataaaccattgtctgaatatgtatgaatttgacattatgggacgggtttatacggtttatcttctcgacaatgagttccatcactccattcttcccattgagaacaatctggcgattgcgccttcagaatatagcaatggacggccagacggttactcaaccgggaaagatggcgtttctattattaacttatctaccggacttgaagtcgcctattacgatatgctgtatgtgatggattattccagatcgccgcgtccttccggaagcgcgccaggtcaggacgtatcaatggatgactggctgcatatcaaccaaagctatattaatgaacccaacaatttgctgatctgttccggtcgacatcagagcgcgatttttggcgtaaatgtggattccggcgaactgcgctttattatggcgaaccatgaggattggtctgacgaattcaagcaatacttattaacccctgtcgatgatgatggtgtcccgctgtacgatcttacctcgccgggagggattgatgcggcagataagaatttctggacctgggggcagcataacattgttgaaattccaaacgatgagcctggtatcctggagtttatggtctttgataatggtaactatcgttcacgcgaagatgcgaaaagtctgttgccgctcgataacttcagccgggtggtgcagtttaaaataaacctaaatacgatgaccgtaacgcgtccgtatgagtatggtaaaacggaagtcgggaaccggggctatagcagttttgtgagcgctaagcatttattgactaatggtcacctggttattcacttcggcgcgacgacggttgatgagtttgaacataccattaccgcgcaaccaggttccagcgatcttgtcgatccggatgaagggcaacaggcgttaggtcgactggtattacaagaaatcaataaagagacgaaagaggtcttattcgaagcgatggtgacgtcgggctatttcaagaacgaagagacgaatggcacgaattatcgttatgatatttctgcatttcgggtatacaaaatgccgctgtttgcataactaagtatgttatgcggccggttatcgaccgcataacattatggcttatttgctaatatcatccacgcgcatggtgtggtcaggttgaatattgttaacctgcttcatatagttaaccaacgccggtgcggtttgtatccctatatatttgatatttttacctttagtgaaggtaaatccgccaccacctttaccgataaaggagtccagcgcgacggtatagagtttattgtcttctaccggtttgcctttgatatcaaattcaacaatacgctggcccagcggtttggtgctgtcatatttaaactggacggttttagatacgtgcagcataccgtttttcagatcggcagcgtgtgacatgatggatttcaggtccttaccgctgatttccatgctcatgacatcgttggtgaacggatacatactcagcacatcaccataggtgatattacctttaggcaattcggtacggatgccgccagcattatagaaggaagcgtcggcgccaggaacggtagccatcagggcatcggtgattaagttgccggttggcgcggattcaccgtaagaacgggtcagcacttccggagagtgcgcgaccacctcatcggtaattttcttaaccttgttatcccattcgtcaattttggcctgcgtgaccggatctggcttataagtatccgcatacatggtgatcaacttaccattgtagctgtccacttttttggtttccgggttccagtcaagcaccagtttacctaattcgatggtgtacgcatccgtggaaacgacaagggtatcgcccactttaatcggttctggcgtacctttatgcgcatggccggtaatcaggacgttaagtccatagccttccagcgatttcgccatatcaacgtcggttttcagtgcgcgtgcgacatcagcctcgcctgcgctggactgcatacccggcacgccttcgtgggcgagcagcacggtcaggtcaactttcccttttaactcttccagctgttttttcacataaggaatcggatcgcggcagtcaacgccttcacgcacgcctgcggcaatcgcttcatagaatgcggaaacgccgtgcataccgatgacgccgatcttgaatccatctttttccacgatggtatacggttctttaattaatggcgtatctgtgccgctgtaaaaaacattatccaacaataccgggaattgcaatttgctgagttgtttaaccagattctcatggccatggtcaaattcatggttaccgacagagacggcgtcgtaaggcatggtatttaaaatatcaataatagcctcgcctttggtcagcgtactgataaaaggtccggtgaaatagtcgccagcatcaaagaaaaagacatctttctctttcgcttttgcatctttgacaattttcgagatgggcgcaaagccgcctaccggacgtgtcttggatacataggggataatttctggggttacatgggcatgtaaatcgtttgtataataaattgtgatgtcacgcgcatcggctgaaaaggaaatggctgaagacaaaccaatgcacagcgacagtagggatatcgaaaactttttgttcatataaaccatccatttacgctacattaaagaaaaacaatgcctgtagtcgtgtcattcacgactacaaaccggggaaattaagtaatattcatcaagtttattaattattaaaactcgaagccgatcaggtaattcatacggtcgccgtagccgtcataccccaatttattattgaagtaacggtaagagacggaggcggtccatcgcggcataaatttccatgtaaacgttaccgcgccgttcaggccggtcgtcccaccctgttgttcggcgtaggcatcattacgatccatttcaacttcgttccagtttgaaatgacgaacttttcattaaacatatcgaagttataagccgcgacccaaccgagaacataaccgttaaagcctgtcgcctgtccatactttttagaggtataatcgttcgataagttatgaacagcgaaatagggcttaataaagcctgatgggctggttaaacccagataacctaccccgtacatcatgtttaattcatcaccgaatttattctccatcgacatatagagtttcatcattgcggtaaagttagagccttctactaccctataatgtcccagaaattgggttacatggttacggccttctaccggatggttgagcacgttcatttcataaaatgatgcaaattcgcccctgtcaaacacggcgccgaaatcggctaccgctttccacacttcgccgcgatcgacattgacaaagcctttattccagtcgccatatccgaagctaagtttaccgtatacgcgtttcaattccgctgcctggccattaaagcaagagaaaagaacacatgcggcgagtagactattaatatatttcttatttttcatgctcaactccatgaggtaaaaacacagtgaaatgttgtgtaaagaagcgaattctaaggagtgtctttttatacgtaggtgatagatgtctcaaaaatatcagcgacatataatcgtcaaatattcgtgtcagataatgttgtttattacgtgataactatttgatttatagtttatgtctctgttgtaaaagtcacaccggatagcatgaaattaatgaaacttcgaatgggaataatctctcgcaaagacaacttactgccattaaatgagggtgttaccgttcaaacagcaacatatattgacatcacaatagcggttctgacatatgggccatatttgagatctgcatcactcgttcgcgatttctttttttatagactgcttcaggcgtgttttctttagcacgaaatatatttatggtattaatattataatgagtgtgaataattttctacgataaaacgatgttaatggaagaaatataagacaaatcgaatatatatatagtgcaattaatttaggctgtattccgcagccgggtctatcggcaaatatatcgtaatcagaccgtgcgataactcaaaggagttgaaatgaaaagaacagtcgttgccagtatgatagggttggcgctatgcgctggatgcgtattatcaaccgcgcaagcggcaaccgcaaagcgtcctaacttagtcattattctggcggatgatttagggtatggcgatctcgccacctacgggcaccgcatcgttaaaacacctaacatagacaaattggcgcaggagggggtgaagtttaccgactattatgcgccagcgcctctgtgttctccttcccgcgcgggcctgttaaccggtcgtatgccgttccgtaccggaatccgttcctggataccggaaggcaaagatgttgcgctggggcgtaatgaactgactatcgccaatctgctaaaacagcagggctacgatacggcgatgatggggaaattacacctgaatgcgggcggcgatcgcaccgatcagccgcaggcgaaagacatgggctttgactatacgttggttaatccggcgggatttgtcaccgatgctacgctggataacgccaaggagcgcccgcgctatggcgtggtgcatcctacggggtggattcgtaatggccaacatattggccgcgcagataagatgagcggcgagtttgtgagctctgaagtggtgaactggctggataataagaaagacgataatccgttcttcttatatgtcgcctttaccgaagtccatagcccgctggcgtcgccgaaaaaataccttgatatgtattcgcagtacatgaccgactaccagaagcagcatccggatctgttctacggcgactgggcagacaaaccgtggcgcggcaccggcgaatattacgccaatatcagctacatggatgagcaggtcggtaaagtgctggataaaattaaggcgatgggcgaggaagataacaccatcgtcatctttaccagcgacaacggccctgtcacgcgcgaagcgcgtaaggtatacgagctgaacctggccggggaaaccgacggtctgcgcgggcgtaaagacaacctgtgggaaggtggcattcgcgtaccggcaatcatcaaatacggcaagcacattccacaggggatggtaacggacacgccggtatatggtcttgactggttgccgacgctggccaacatgatggactttaaacttccgaccgatcgtacctacgacggtcagtctttagttccgctcctgaaggacaagactttaaaacgccagaaaccgctgatcttcggtatcgatatgccgttccaggacgatccgacggatgagtgggcgatccgcgacggcgactggaagatgatcatcgatcgccagaataaacctaaatatctctataacctgaaaaccgatcgtttcgagacgctcaatcaaattggtaaacagccgcagattgagaaacagctttacggtaagttcctgaagtataaaaaggatattgataacgattcgctgatgaaagcccgtggcgataagccgacgcctgtcacctggggctaatggaataattataaaaaattaagtatgccacttagggcgatgcccacctgatccggtcactctgtgccggatcaggttcttttatttcagggaaggtaatgatgtttgggaaaagttgtcaggtcatggttaaaccgaccggatcggtgtgtaaccttgactgtaagtactgtttttatctggagaaagaaaagctctatccggatcgaaaaaaccattacaaaatgtcggaagagaccctcgaactcttcatcaggcagcagattgccgcacaggatattgatgaggtcatttttgcgtggcagggcggggaacccacattaatgggcatcccgttttatcgtaaagccgttgagtttcagcagcgctattgtggcggcaaaaccatcgtcaataccttccagaccaacggcatcctgatcaacgatgactgggcgaccttcttccgggagcatgattttctggttggcgtctctattgatggcgatgccgcgttacacgatgaatggcgagtgacgcgctccggaaagccgacgcatgaaaaagtagaaaatgcggtgcgttgtctggcgcagcacgacgtagaatttaataccctcacggtggttaaccgtaccaatatgcatcatcctgttcaggtctatcgctacctgaaaagcattggtagccgctatatgcaatttatccctttagttgaacgctgtggggaaaatgggctggcgcagccgcaggataaacatatcgcgatgacgccgtggtcggtcgatagcctgcaatttggtcagtttctgaatgcggtatttgatatctggatccgtgaggatatcggcgatatcggcatccagctatttgaacagacgctggcggcctggtgcggcctgccgccgcaggtttgcgtttttgctcccacctgcggcagcgcgtttgcgatggaaatgaacggcgatgtttataactgcgatcacttcgtatatccgcaatttaaactggggaatatccaccagaagacgctgcgtcaaatgaatcagggcgaacaaaatcgccagttcggcagcgataaacagcgttcaatggcgcaggagtgtcatcgctgtcaatggaagttcgcctgctatggcggctgtccgaaacatcgttttttaccctctgcgtcaggcgcaaccaatcataactatctgtgtgcaggttatcaggcttttttctcgcataccgcgacggcgatgagtgccatgcgaaccctgtatgaaaaaggcatctcacctgcagaaataaagtcaatatttgtttgaaggtagtattcgcagggagtgaatatgttttctcacattaatgtcgatgcttgcaaaacgccaggctgcaaaaatctggggattctggggagcccagactatctaccgcaagggaaaaatgttctctgtcgagcgtgcggttttttgttccccattatctcagccagatcgcttaatctttttcgccaggcggcgaatcaaccctggaaaggtctggtgaagtcctgtccgcattgtggcgggacgtcgctgaaaaaatatggattttccactaaaggtgaacggcgtatgtattgccgccagtgtaataaaacgttcatctcctataccgctatcaggagcgacgccagacaagagaaccttgccacgttgattggcgaaggagcgtcgctagttgaaatacgcgcggcgctggcgatagacagcacgggttttagccgcgaattacaaaaactgtcccgtcgcgctaatcaagcggaacgcgattttgtgtttcccgcgtttgatatcgctatgagcacgcgggcgtttcgtgtgaaatttaacggcggcgacagcagcttatacgtgctggtgacggcggaagaggagagcggtaaggtcgtcgcgatctcaacgaattactccgcccaaccggtggaagcggattatcaatatcattctgattacgaagaacgacttccgtccggcacgctggcgcatctggtgcagcgaaaagaggcgctgaccatgcgccgcaatgtattatttgatgtggattacggccccgccgttttatataaaaacgatccggggatgttagtaaaacccgtattacctgcttatcgacattttgagttggttcaggcgttgacggatgagcgttccctgaatgtccaacattatctcgatcacgaatgcttcattctgggcggctgtatgatggcgaattttagctatcttcgtcaggggcgctgtcatatttcgtttgtgcgtgaaagaggcgttacgccgcccaaacgcgatctccctccgcggttgtttttgagcggcggaattcgcaacaacgtctggcgtacattttccacacgggattatgcgatggcggtatgcaatctcacaggaaataaaaaggtgagtttgttacgccatgcgacgttaaatagcgcgacggcgtttattcgctatgttcacaaccatcccttcctgccgcatcttaaccggatgtctcctggcaatgttgttgccgtactggattacctaaaatttgaatataacgcttcacgtaactgaattgctaaaataaaaagtgtgatgaggtgttgttgcggtattttattcggacggcttaaaaatccagagtattaattttcgtggtccccatgaggggcgatgagattaatacactggagatttatcatgaatacgttaactacaacgtctgttgtccttcctgcgccgcgtccggcgattaatcagggtatcgatatcaataatgaaatggtgcttaaccataccgctatttatgaaaattgccttgcgcaggtcacgcaagagaatacggtagaaaatgcgctcatgttgttagacccttacggcacggcgcctttaagcgcttatgccggggtctggagtctggaaccggctgagatcatagtcacggtccaggatgcggcaaaaacggcgatgccggtagaacatctttacacccttacggcaggcgcaaatctgttgccggttctggggctggtagcggatactgaaaaccgtattgtcttttctcaggcagatacgccgcttgccgtctatacgctcatcacacagccattaccgccggtagattccgcggaggtcgtattaggttttccgattatcaacgtgacgcaacctgctaccgatgcgaacaagatggcgccagggttttattttattacgcatttcgatcgttataattacgcattagatcagaatggtctggtgcgctggtacgttactcaggattatccgtcttataattttgttcgaattgataatggccatttcctcactacttcagaagcgaaaaatacctatctggatatgtatgagttcgacatgatggggcgtcttcacacattctataatctcgataatcaatttcaccattctatctggccgtgggatagcaataccattgttgcgccctctgaatatacctcgggtcggcccgacgatttgaaaaccaatgaagacggcgtatcggttgtcgatctgactaccggactggagacggcttactacgatatggcgaaggtgctggatacgacgcgggtttcccgtccttcaggtacggcgccgggagaagacccgacggttaaagactggctgcatataaaccagagctacgtgaatgagacgaatcagttgttaattgcgtccgggcgtcatcagagcgcggtgtttggcgtcgatctgcaaacgcaagcgctacgctttattttgtcaacgcatgaagactgggacgacgcttatcagccttatcttttaaccccggtcgacagtgaaggtgtggcgctttatgactttagcaaacaggaggatatcgacgcggccgaccgtgacttttggacttggggccagcataacgtcgttgaaatcgccaataatacgccgggtatagtggagtttatggtatttgataacggtaactaccgttcgcgtgatgacagcaaaagcctgttaccgccggataactacagccgcattgtccatttcgtggtgaatatgaatgagatgaccgttatgcggccatttgaatacggcaaggagctgggcgcgcgtggctacagtagctgcgttagcgcgaaagcgatccagcagaatggcaatattgtggtgcattttgccgactgcacgtttgatgaaaatggccgcgccatctcttgccagcctggcgagagcgatattatcgatccgcaggcgggcagtgaggcgatggggctgctaattttacaggagattgcgcctacggagaaaaccgtgctttttgaagcgaccatgacgtcaggttactacaaaaacgcggaaacgaacggggaaggctatcgctacgatattaccagtttccgggtgtataaaatggatctgtacgcgtagcggtctatcatcaatgactgactgcactaaaaaagtccggcgtaagtcggacttcatttcgtaaaaaacgagctattcatcatatataatctaattttaacgatgagtcaggcgaggtaagatagtagatccgaagaattcacctgattgagagaataaaaagtgaaacatctgcaccgattttttagcagcgatgcctctgggggcatcattctcatcatcgccgctgcgctggctatgctgatggccaatatgggcgcgaccagtggatggtatcatgattttctggagacgccggttcagctacgggttggggcgcttgagatcaacaaaaacatgctgttgtggatcaacgatgcgctgatggccgtgtttttcctgttgattggcctggaagttaagcgcgaactgatgcaaggctcgttagccagtctgcgccaggccgcttttccggtgattgccgccatcggcgggatgattgtaccggcattgctctatctggcctttaactactccgatccggtcactcgcgagggctgggctattcctgccgcgacggatatcgcctttgcgctgggcgtgttggcgctgttgggcagccgggttccgctggcgctgaaaattttcctgatggcgctggcgatcatcgatgatctcggcgccatcgttattatcgcactgttttataccagcgatctttctatcgtctcgctgggcgtggcggcgttcgcgattgccgtgctggcgctgctgaacctgtgcggcgtcagacggactggggtatatattctggtcggggcagtgctgtggacggcggtactgaagtccggcgttcacgcgacgctggcaggcgtcattgtcggtttctttattccgctgaaagaaaaacacggtcgctcgccggcgaagcgtctggagcatgttctgcacccgtgggtcgcgtacctgatcctgccgctcttcgcttttgcgaatgctggcgtttctcttcagggcgtcacgattgacggtctgacctccatgctgccgttgggaattattgccggtctgctgattggtaagccgctggggattagcctgttttgctggctggcgctgcgtttcaagctggcgcatctgccacaggggaccacttatcagcaaatcatggcggtcggcattttgtgtggcattggctttacgatgtccatctttatcgccagcctggcatttggcaatgtcgatccggaacttattaactgggcgaaattgggcattttgattggttcattgctctccgcagtggtggggtatagctggttgcgcgcgcgtttgaacgcgccggcataatcagtacgaaggaaagggggagcgatgtatcgctcccttgcgacattgaacagggagagaaatgagcatgtctcatattaactacaaccatctttattatttctggcatgtctataaagaaggttctgtcgtgggtgccgcagaggcgctttttctgacgccgcaaaccattactggtcaaattaaagccctggaagagcgtttacaggggaagctatttaaacgtaagggacgcggtcttgaacccagcgaactgggcgagctggtttttcgctatgcggacaaaatgtttacgctaagccaggagatgctggatatcgtcaattaccgcaaagaatcaaacctgttgtttgatgtcggcgtcgccgatgctttatccaagcgtctggtcagcagcgttctggatgcggcggtggtggtggacgaacccatacatctgcgttgcttcgagtccacgcacgaaatgttgctcgaacagctcagccagcacaagctggatatgattatctccgactgcccgatagattccacgcagcaggaggggctattctcagtcaaaatcggcgaatgcagcgtcagtttctggtgtacgaatccgtttcctgaaaaagcgttccctgcctgcctggaagagcgacggttgctggtgccgggacggcgctcaatgctggggcgtaagttgttgaactggtttaattcacaggggttgcaggttgagatcctcggtgaatttgatgatgcggccttaatgaaggcgtttggcgcgacgcacgatgcgatttttgtggcgccgagcctttattcgctggatttttatgccgatgagtcggtaatagagattgggcgcgtggagaatgtcatggaagaatatcatgcgatttttgccgagagaatgatccagcatccggcggtgcagcgtatttgcaatgcggactactcggcattgtttaaactacagtagacgtacctaccgtaatacttccggctgcggtattaacccgcagccggaatcattctacaagttcagcaggctacggtactgcccaccttcgcggataaacaccggaattctgttcagtggcgtagcgtactgcagcgtctgccctcctgaatagctttcaccggtcgcaagatccgtccatgtttccccttctggtagccagacatcacgttcgcgcataccttcatgcatgacgggggcgatcagcaggtcaggaccaaaacaatactggtcggtgattgtccaacttgtttcctgttcggggaattcaaagaacagggggcgcatcactggcgtattgtgcttatgggtttcctccatcagcgctttgatatagggcttgagtttttctcgcaacgccaggcaacctgtcagtacctcgcatacttcctcaccgtagctccagacctcgttcggcgcacctgtagggcactgggcgataccatcccgatacggttgtgcgggtaaaatctgcggatcgcggttgccgtgcagacgcatcaccgggctaaagacgccccactggaaccagcgaatcagcaattcatggaatttcgggtcgtgaatattgccaccatgaaaaccgccgatatccgtcgtccaccacggtatccccgcgattcccatattgagtccggcagcaaactggttgcgcagcgatctaaacgaggagtgaatatcccctgaccagaccagagcgccgtacttctgactgccggcccaggcgcagcgtagcaggttgataacctggtcttcgccatcggctttcatgccgtcaaaaaaggttttagcgtacatacgtgggtagatattgcccacttccagtaccggcccggcatggtagcgatagttgtcgtagtcgtaaacgctgaactcaggttcggcttcatctaaccagaataacttcacgcctttatcgtaatagttgcgtttggctttgccccagacgtagtcgcgcgcgcccggatgagtcgcatcaaagtaagtggtattgccgaggaaatccatattgatcggcaagccacgttccgtttgtaccagccagccgttttcgcgcatctcccgatagctttcggtacggttatccaccgtcggccagacggagaccatcagctcaattcccagcgatttcagctcggcaatcatggcatcaggatcgggccagtcgcgcgcatcgaacatccagtcaccctgattcggccagtgaaagaagtcgattacgatcactgagataggcagattgcggcgcttatattcgcgggcgacctccagcagctcttcctgcgtacgataacggagtttgcactgccagaagcccatggcgtagtccggcatcatcggcggtgtgccggtagccagcgcgtaagcccggctaatttctgccggggtatcgccagccgtgatccagtagtccagctgttcgctgacctgcgcttcccattcggtaacgttttgggcaaaggttacgcgtccgactgccgggttgttccataaaaatccgtagcccagactggagagcataaacggtactgaggcctgggagttacgttgcgccagctcaagcacgcatcctttgagatccaggttggcctgttgatactgccccatgccataaattttttccccttcggtggcttcgaagcgggctttcagtgaatatttcccaccctgaatagggcggaactcgcgtccctcaaggttgagtgcgctgacgtactggccgtgagatgattcatcctcgccaatttcgccccgcaggcgccagaactcctgcaacaggggtttgtgtggatggcggtaaaaggtaacctgtcctttttgattgacgatagcgataattttgccgttggtcagcgttgcctggtggtgctcataatcaatgtggcactgactttctgcgactggctcagtcaatgcccagtcttcatttctcattaccggcagatgacggccgctgcgtacgcgcaggctgttctcgccccagggttcaatccataaatagcgatcgttttgctgccagaccagacgacgcgggtcttgttgcataaatggcatggtggtgcctcccatattcgagggtgaaggtaaagaacgttatgagttgacggtttccagatcgtggcgaatcttctcttccatcgcttcgtatttgcgaaagaaaagtagtgggatcgctgcgagcgcgaagagtagggcgggtgcccagataaaggcccagataatgccctccagacccgcagcactctgggcatggttggggacatagccaaaactgttcatgatccaggcggcgaaagcggtgccgaggccactacccatcttgatgcagaaggtactgccgaaggcgataagaatgccggtagccttaataccggtcttccaggcgccaaaatcaacggcgaagcccagcatggcaaatggcattgagcaggcgataccgctgccgatattgccgagtatccaggcggcgatgaggaaagtaatgttgtccgctgccagccacatcatgacgccgccaaacgtggcgaccagcagaccgcctacccatatccaggttttagccaggtatttgctaaagaaggggatagcgatgataaacaggatctgaatcgtcgccaggctgttaatcagcggtaccagatctttacggtcgaggttgtaggtcagataatagacaatggtcgtgttgcgctgctgtagggcaatccagaagatcagattagccagcaccatcaggatccacggccagttacctttcatcgccgcgaaactttttttcatcggcaacttaggttcatgctgtattttatccgtatccatttcacgaatgtttttaaacgcaaagagcgttagcgcgcaggatataatggcaaacgtaattgccgtataaataaaaccagcgtgatcatcaccgttacctaaaaaagcgactaacggcaaggcggtcgcgttcattaataaaaccccaatttgcccaccggtcattcgccaggaatttaaaaccagtctttctttgggagataaggtcatcaggggtaatattgcactgagtggtgtattaagtccggtaaatagaatgctggcaatcatataagatattgctgcatagatggcttttcctgtcatactgatatcaggagaccaaaatgacagcgcgctgaataccgcaaaaggcagcggtaaccataaaaaccagggacgacatttaccgtagcgtgaacgtgttttatcgatgatgatcccccatatgggggcgtctatgccatcgataatacgcgccagcagcaggataacgcctgctacggcaaggctaatgcccgcaacgtctgtgtagaaatataaaatgtacgttgaactgaagcagtacagcagattacccgccacatccaaagagccgtagctaatacgctgtagtaaagacaatgatgctgacccggaaggctgggtatcctcaatgacagaactcataatgataactccgatattggtacgatacgcccagaaaaacaacctctactttctaagcaagttttgaatattatttttatgtcgtttctgaatttaacctcagattaaaatgagtaagtaaggtgtacatgaaaagtagttaacccgacggcatcaatcaattattaaatcttacatcaggattgcgtttattagtttttgaatgagcgatgtttttatttgctaaggtggtcacagttttttcagtaatgaaataagaaaaggaaaacagtgaaagaaaataactttcaagtattacgtgactaagggaggggtagctgaaaaaataggctggtcaggaagagcgtgaacgagtgaggtcagagccagcggttgtcgagcaaaacggcagatagcaggcataaaaaaacccgctttacgcgggtttttctacaaagctgataacaagcaggcgattaagccagtttgttgatctgtgcagtcaggttagctttatgacgtgcagctttgtttttgtggatcagacctttagcagcctgacggtccacgatcggttgcatttcgttaaatgctttcagtgcagcagctttgtcgccagcttcgatagctgcgtatactttcttgatgaaagtacgcatcatagagcgacggcttgcgttgtgcttacgagccttttcagactgaacggcgcgcttcttagctgatttgatattagccaaggtccaactcccaaatgtgttctatatggacaattcaaaggccgaggaatatgcccttttagccttcttttgtcaatggatttgtgcaaataagcgccgtttaaattgcagcactcgttgcgtagtgatggcgcaggattctaccagcttgcgtgctgtgaatacagcctttccatgagaaaaattgcattaagcggcgggttttggggcggagtttgccgcatggcgatgaaaagcatcttctttatgtttcatcagggcaatcgccggttaaccttaaccgctgtacaaggtatactcttgcgattttcactgttttgagtcagacatgaagctgatacgcggcatacataatctcagtcaggccccgcatgggtgtgtgctgaccattggtaatttcgacggcgtacatcgggggcatcgcgctctactgcagggtttgcaggaagaaggacgcagacgcggtctgccggtggtggtcatgattttcgaaccgcagccgctggagctgttcgcgacggataaagcgcccgctcgcctgacgcgcctgcgtgaaaaactgcattaccttgcgcagtgcggcgtggactatgtgctgtgcgtgaaattcgatcgccgctttgccgctttgacggcgcaaacgtttatcagcgaactgctggtggagcgacttggcgtgcaatttcttgccgtcggcgatgatttccgctttggtgctagccgcgcgggcgatttcttgttattacagaaggcgggggcggagtatggttttgcggtttccagcacccaaaccttttgtgaaggcggcgtgcgtatcagtagtaccgcagtgagacaggcgctggcggaagataacctggcgcttgccgaaagtctgctgggacatccctttactatttccgggcgtgtcgttcatggcgacgagctgggacgtaccattggcttcccgacggcgaacttaccgctgcgccgtcaggtctccccggtcaaaggggtctatgcggtggaagtcaccgggcttggcgataagccgttacccggcgtagcgaacattggcactcgtccaacggtggctggcgtgcgtcaacaactggaagtgcatctgctggacgttgtaatggacctctacggtcgccatatagatgtaatactgcgtaaaaagatacgtaatgagcagcgatttgcgtcgcttgatgagctaaaagcgcaaatcgcacgcgatgagttaacggcccgcaagttttttgggctagccgggcaggtgtaaccctgacggtgtttatcaaaccgaaatacggaaccgagaatctgatgagtgactataaatcgaccctgaatttgccggaaacagggttcccgatgcgcggcgacctcgccaagcgtgaaccgggaatgctggcgcgttggaccgatgatgatctgtacggcatcattcgtgcggccaaaaaaggcaaaaaaaccttcattctgcatgatggccctccatatgcgaatggcagcattcatattggtcactcagttaacaagattctgaaagacattatcgtgaagtccaaaggactgtcgggatttgactcgccttacgtgccgggctgggactgtcacggtctgcctatcgagttgaaagtcgagcaggagttcggtaagccgggcgagaaattcactgccgctgaattccgcgccaagtgccgcgaatatgccgctacgcaggttgacggccagcgtaaagacttcattcgtctgggcgtgttgggcgactggtcgcatccgtacctgaccatggacttcaaaaccgaagccaacatcatccgcgcgctgggcagaattatcaaaaacggtcatctgcacaaaggcgctaagccggtgcactggtgcgttgactgccgttccgcgctggcggaagcggaagttgaatattacgacaaaacgtcaccgtctatcgacgtggcgttccgcgccgtcgatcaggatgcggtgaaagcgaagttcggtctgccgggcgtgagcggccctgtgtcgctggttatctggaccaccacgccgtggacactaccggctaaccgcgccatctccctggcgccggactttgattatgcgctggtgcagattgacggccaggcggtgattctggcgaaagatctggttgaaagcgtcatgcagcgtattggcgcggctgaatacaccattctcggcaccgttaaaggcgcggagctggaactgctgcgctttacccatccgtttatgggctttgacgtgccggcgatcctcggcgatcacgtcaccctggacgccggtaccggcgcggtacataccgcccctggccacggcccggatgactatgtgattggtcagaaatacggtctggaaaccgctaacccggttggcccggacggcacttacctgccaggcacatatccaacgcttgacggtgttaacgtcttcaaggcgaacgatatcgttattgaactgctgaaagaaaaaggcgcgctactgcatgtcgaaaaaatgcagcacagctatccgtgctgttggcgtcacaaaacgccgatcattttccgcgcgaccccgcagtggttcgtcagcatggataaagaagggcttcgtcaacagtccctgaaagagatcaaaggcgttcagtggatcccggactggggtcaggcgcgtattgaatcaatggtcgctaaccgtcctgactggtgtatctcacgtcagcgtacctggggcgtaccgatgtcgctgttcgtgcataaagaaacgcaggagctgctgccgattgagcgtactctggcggcgatggaagaggtggcgaaacgcgttgaagttgacggtatccaggcgtggtgggatctcgacccgaaagagatcctcggcgaagatgccgatcaatacgagaaagttccggatacgttggacgtttggtttgattccggttccaccagttactccgtggttgatgcacgtccggaattcgccggtcatgctgccgatatgtatctggaagggtctgaccagcatcgcggctggtttatgtcctccctgatgattagcgtggcgatgaaaggcaaagcgccataccgccaggtactgactcacggcttcaccgtcgatggtcaggggcgcaagatgtccaagtccatcggtaacaccgtgtcgccacaggatgtgatgaataaactgggcgcggatatcctgcgtctgtgggtggcgtctactgactataccggcgaaatggcggtctctgacgaaatcctgaaacgtgctgccgacagctatcgtcgtatccgtaataccgcgcgcttcctgctggcgaacctcaatggcttcaatccggccaccgatatggtcaaaccggaagagatggtggtgctggacaggtgggcggtgggctgcgcgaaaacggcgcagcaagagattctgaaggcatacgaagcttacgacttccatgaagtggtacagcgcctgatgcgcttctgctccgttgaaatgggttcgttctacctcgacatcatcaaagaccgccagtacaccgcgaaggccgatagcgtcgcgcgtcgtagctgccagactgcgctgtatcatatcgcagaagcgctggttcgctggatggcgccgatcatgtccttcacggctgatgaaatctggggctacctgccgggcgagcgtgaaaaatatgtcttcaccggcgaatggtacgacgggttgtttggcctggaagagaatgaagaatttaatgacgcattctgggacgatgtccgctatatcaaggaccaggtcaacaaagagctggaaaatcagaaagccaatggcatcaaatcgaacctggaagcaaaagtgacgctgaaatatgctgacgatgctaacggtacgatcaagaagctgaaactgttgggcgaagaggtcagatttatcttcattacttcccagttcgtgatttctgagcaagcggggggtattgatgatgaaaatattcagtacaatgctggtaatacgacagttcaggcagtggtaacgcgtgccgagggtgataagtgtccgcgctgctggcactacactactgatgtcggcaaggtggcggaacatgcagatatctgcggacgctgtgtcagcaacatcgccggtaatggcgaacaacgtaaatttgcctgatgagtaaaccactctgttcaacaggactacgctggctatggctggtagtagtcgtgctgattatcgatttgggcagcaaatacctgatcctccagaatttcgctctgggggatacggtagggctgttcccgtcgcttaatctgcattatgcgcgtaactacggcgcggcttttagcttcctggcggatagcggcggctggcagcgctggttctttgccgggattgcgatagggatctgcgtaattcttttggtgatgatgtatcgctcgaaagcgacgcagaagctgaataacatcgcttatgcgttaatcatcggcggcgcgctgggtaacctgttcgaccgcctgtggcacggctttgttgtcgatatgatcgatttttacgtcggcaactggcatttcgcgacgttcaaccttgccgatagcgcgatctgtatcggcgcggcgctgatagtactggaaggctttttgccgaagccgacagcgaaagaacaggcataagcgtaaataccgggtggcgcttatccggttttgtaggtctgataagcgcagcgccatcaggcaaacgtggtgccggatggcggtgaaaacgccttatccggcctacggttttatcgtcctttgtgcctccgggcaaaacacgtgagcaatttgcatgtctaaatccgtacagagcaacagcgcgatcctcgttcacttcaccctgaaactggatgatggctcaacggcggaatctacccgcaataacggcaagccagccctgttccgtcttggcgatacctcgctttccgaaggtctggagcagcagcttctggggttgaaagaaggggaaaagaaagcgttttcgctggagcctgacgccgcgtttggcgtccccagtccggacttgatccagtatttctcgcgccgtgagtttatggcggcgggcgaaccggaagtcggggcgattatgctttttaccgcaatggatggcagcgaaatgcctggcgtgattcgcgaaatcaacggcgactcgattaccgttgattttaaccatccgctggccgggcataccgttcactttgatattgaagtgctggaaatcgatccggcgctggaggcataaacatgcagatcctgttggccaacccacgcggtttttgcgccggggtagaccgcgctatcagcattgttgaaaatgcgctcgctatttacggcgcgccaatttacgttcggcacgaagtcgtgcataaccgctatgtagtggacagcctgcgcaagcgcggggcgatctttatagagcaaattagcgaagtgccggatggcgccattctgattttctccgctcatggggtttcccaggcggtgcgtaacgaggcgaaaagccgcgatcttaccgtttttgacgccacctgcccgctggtgacgaaagtccatatggaagtggcgcgcgccagccgtcgcggtgaggaatctattctcatcggccacgccgggcacccggaagtggaaggcaccatgggccagtacagcaacccggaaggggggatgtacctggtggagtcgccagaggacgtctggacgctgaatgtcaaaaatgaaggcaagctctccttcatgacgcaaaccacgctttccgtggacgatacgtccgatgtgattgatgcgctgcgtaaacgctttccgaaaatcgtcggcccgcgcaaagacgatatttgctatgccacaactaatcgtcaggaagcggtgcgggcgcttgcggagcaggctgacgtagtgctggtggtcggctcgaaaaactcttctaactctaaccggctggcggaactggcccaacggatgggaagaaccgcgtttcttatcgacgatgcggcggatatccaggaggcgtgggtgaaagaagccgcctgcgtcggcgtcaccgctggcgcttccgcgccggatattctggtgcagaatgttattgcgcgtctgcgcgagtttggcggcggcgaagctgtcacgcttgaggggcgcgaagaaaatattgttttcgaagtgccgaaagagctgcgtgtggatgttcgtgaggtcgaataagatttcacaattcagaaatctgcctgatgacgctacgttgaccagatcttaagaatttcttttgatattcaatgtgcgacaggaagaataaggcgtagtcgtcatccgttgctaatgccccacctttttgctattcatctgaaaaaccagcacaatcgttgctggttttttggttgtaatgcctacagggataagggaaatgggcaaaataaaatatggattgccaacgttactcgccatcggcttttggatggacgcaacaagcgccacggtgctggagctacctgcctgggagcgaaactataccgggactatcgcggggaaaccggtaaacgttaatatcacgcgatttggtaactctcttaatgggtattactgctatgaaccttgcaatcagcacaaggcagtgattgttctacgcggctcactccaggataaagaggtgcatcttgaagaacgcgtaaaggcgctttcgggttactggaatgcggaaatctccagcagtgagattaaaggcgaatggacgtccgcagataaaaaacgacattttcctgttgcccttatctattacaaacctaaaaactcccctgatattgtgctggtcacgaacacgaatgatgcagggggttacgacccttccaaagagattgattgcggcaatacgccggccatttcggcgataaaattataccgtgatggtaaactcatacagaccttagataccgcctcggtgggcacttgtagcccgtttatgcctcaatggggggatgtcaattttgatggctacccggatctgtcgattgtaacagagttacttgctgggccggatgctccagttcaaacatggctctatgaccccgccaaacagcgttatgttgatgcgccagcgtcttatcaggaaatcacttcaccagagatcgatgctgaacataaacagattgtcagctattggcgcggcggttgctgcagccatggcgtcaatgtgtatcgctggaaaggaaaaacgattgaactgatcgatcgcggtgaaagctactttcagcctgtgatcagtaaaggcaaaatgtataactgctacatgacaccttcctacgctgatgggcgtattatttatccgctagtacgtaaaaatggtcatttgacgccgcctcttagccttgatgggacgtgtcaatctttttggctaaccggtaatgttcgtaccgtgattcaggcagaaaaacccggcgctgagcccgaatcgcttgagattcagtggcaggaaaacaaagcatcgccagggcgtttttgcccattagttccgtttgtcgaaggtgataagctaagtccgcgtctggtgacggatgacgatgtgcctgatgcctgtatcagtcgcgctgagtatgaagatataaaacaataggtcaggagagcattaatgacagcatccctacacattattcttgataccgatccgggcattgatgacgcggctgcgattgccgctgcgctgttcgccccccagcttgatctgcaactaataaccaccgtcgcaggtaatgtttccgttgaaaaaacgacccgtaatgcgttgcagcttctgcatttctggaacagcgatatcccacttgcccagggggccgcgacaccgctgctgcgtccgttacgcgatgcggcatacgtccacggcgaatccggtatggaaggctatgattttgtcgaccatcagcgccaaccgttggcgaagcctgcgtttatcgctatccgggatgtgctgatgaacgccccggagcccatgacattagtggcgattgggccattgaccaatattgcgttgctactgatgcactatccggagtgtgcgtgtaacattcgccgtctggtgttgatgggcggttccgcagggcgcggcaattttacgcctaatgctgaatttaacattgctgtcgatccggaggccgcggcgctggtgttccgcagcggtctggagattgtgatgtgtgggctggacgttacaaatcaggcaatgctctcgccagattttctgaataaactgcccgcgctgaatcgcaccggtaagatgttgcacagcctgttcaaccattatcgcagcggtagtatgcgcactggcgtccggatgcacgatctctgcgctatcgcctggctggtgcgtccggagctttttaccctgcaatcctgttttgtggccgtagaaacgcaggggcaatataccgccggtaccacggtggtggatattgaagggcgtctggggcagcccgccaacgcgcaggtggcgctggcgctggatgtggacggttttcgtcagtgggtggctgaggtgtttgcctatgcgccgtaattacatgttggcgccataatctcatactttgccgcgatagagtctctccggcctgcccactttcccgtagctgatctccgcttcgagaaagttatttttcacgccttgttccagatagcgtcgggcagtggttttactgctgcccagaatttgcgccagagtgtctgctgtatgtactgcctgcgggtcggcgaatatttgtcgtacccggttgaaggtgttttcatcaattccccgcagtccgctattcggttctgcggtttgttctttggcctggatattaaataaggcatcaacgtgcgtctggtttgcctgctcactggaacgtaacgaactgcggtaacgggtgaaccgctccagggtatgctgcaggcgctgataatgtaccggcttaatcaggtaatcgaatacgcccatgcgtaaggcatcgctgatggtatccatatgattgtcggcggtaatgaaaataattcgccccgtgtagttggtgctgatggtatgacgaattaaatcgatccctttgccatcgggtaaaaaattatccaatagaattaactgtggttgatagaggcgtatttgcttcttcgcactttccagtttgtctgcgatgccgacgattgaaaactggggaaaaatcttgatggtgtccaccaggatttccgctagcatcggttcgtcttcaacgatgagtgtcgtaatgctatccatgttattcttctctggtaaaagggatatagagggtaaaaatggtgccaaaaggattattgttatcgacgataatgtcaccattggcctgcttgacgtagctgtgcaccaaccataatccaattccgtgatcgccgttgttgtgggtggtcactccacgctcgaaaatatgctggcggatattttcgtcaataccacatccctgatcggcaacttcaataatgacttcattaccttcgctgttgatcaggcactcaatctgtcgcgagccttcgcgattgagcagggtggcgttataggcgttgtccaataaattgccaacaatcgaaatccattcattatgcgagagcgatgacggcaggtgttcaacaaagcttgaaggatcgaaaatcagctccagccccagctcttttgcccgataatatttaccgattaatagccccgcaaggtggtggtcgcggaaattatgggaaataaaatcgagtactttctggtggctttccgactgctgctgaatcagcgccagcgcattatcgtagcgcttcaggaacagcagtccggcaatggtggaaataaggttgcgatgctcatgctgcacggcgcgcaggttatcggcgtattgccgcacctgacttaactgcaggctgagtgtattgatatcgtctttgttgcgaaagctaataacccagccctgaggctggttgtcaataatgaccgccatgcgactggcgatgactttcatttggttaaaggtgacgatctcatcttttttgtttttttgcggcgcatcgtaaaagaaggcctccggcaacacgacatggtggattgcatagccaatgagttcagactccggttggctcagattcagtaagcggcgagccgtttggttaatggcggtaatacggtgatgggagtcaatggcgatcaacccttcaaataccgactcaaataacacgctttgctgaattaatagttgtgaaagctgctgcggctccatgttaagcatctgctttttaatatgcagcgagaagcggcgggcacagtacaacagtaccagcagcagtaacgccatcgggaacagcaacgagctgatttgtaagttaagccagctctccaactgttccagagtatagccgacggaaacaataccgatgactttaccggtactgtcctgaatcggggatttaccacgtagggaagagcctaatgaacctttgcgcaccgatacgtagcttttagcgttatacagcgcgtcgtcgctatcgccgccctccatatatttgccgatctcatccgggttgacgtgatacagtcgctgacctttttcgttgccaacggtaatgtaagtcgcatccgaaaacgagcgcattgggtcaatcaacgctttgatgcgtgacaaatcatgcgcttctacggcttcaactaattctggcatagcggatatttgcattgcctgaataagcacacgttggcccacctgataatgcaggcgttctttcgtgatatcggtcagataccaggtgattgccagcatcacgatggtggatgtaaacaggatcagtagaaatatccggttttgaaacgagtgtctggcaaaccagcgtgtaatttcccgtataaacatattggtatttaaatatttaattacggtattttcttgcattcggcatcaccggaacctgaaccagttcatacttacttttctttcagaaaaaatttggatgaaaatgggatacgacatgcgtatcccatccactattacatcgccagcacgtatttcagcatcacgcccgcggcaatggccgagccaatcacccccgccacgttcgggcccatcgcgtgcatcagcaggaagttctgcgggtctgattccagccccactttgttcgatacgcgggccgccatcggcaccgccgagacccccgccgaaccgataagcgggttgattttgttcttactgcacaggttcagcagcttcgccatcagcaccccggccgccgtcccgataccaaacgcaatcacccccagcagcagaatgcccagcgtctgcggttgcaggaacttatccgccaccagcttcgcgcccaccgacagcccgaggaaaatggtgacgatattaatcagcccgttctgtaccgtgtcgctcagacgctccaccacgccgctttcgcgcatcaggttgccaaaacagaacatccccagcagcggcgccgcgtccggcagcagcagggccaccagcatgagcagcaccaccgggaagaggattttttcccgcttactcaccgtgcgcagctgcaccatgcggattttccgctccgtctcgctggtcagcgccttcataatcggcggctggattaacggcaccagcgccatatacgagtacgccgccaccgcgatggcccccagcagctccggcgccagcttgcccgacaggtaaatcgccgtcgggccgtccgcgccgccgataatgccgatggccgccgcctgcggcagggtgaagctgataaggccgaagtagttcagcgtcagcgccccgagcaccgtggcgaagataccgaactgcgccgccgcccccagcagcagggtgcgcgggttggccagcagcgggccgaagtcggtcatcgcgccgacgcccatgaagatgaccagcggcgcgacaccggaaccaatcgccactttgtagaacagcgccagtacgccaggcgtgtagcccatgtccaccgccaggttctccatctggccctgcaccgacggtagcgccagcgctaacgcctctttaatggcatgcacgtccggcgcgcagttcagcttcgcggcaatcaccgccagttgcccggcgtcgtggtgcgccagcaggctttccagcgcggtcagcgccatacccgcttccgggatgttggagagcagcccgccgaagccaattggcagcagcagtaacggctcgaacttcttcgcaatcgccagccacagcagcagcaggctcaccagcagcatgatggcctggcctgcgccaaggtgcatcagccccatgccctgaagcagggcgttcagactttccatttcagttctccgttacgccagcgtcatcagggtgtcgccgacggagaccgcgtccccggacttcaccgcgataccgcgtaccgtcccggcctgcgcggcgcggatttcggtttccatcttcatggcttccagaatcagcagcacgtcgccttcggccaccgtctggccctcggtggcaatcaccttccagatattccccgccagcggcgcggtgaccggggtgccggcgcctgccggggcggcagcctgaaccggtgcggaagaggccgccggaacagccgcagtgagctggctgatatcgccgccgtcgctgaccttcaccacaaaggctttgccttccacttccacggtgtagataccggaagctgcaggcttctctgcttttgccaccggctgcgcggcttccgcctgcggcagtggctcaaacgccgccgggttgtggcggttctcaaggaatttgaggccaatctgcgggaacagcgccacggtgagcacgtcgtcaatggcgtttcccgccagagtaatgcccttctcctgcgcctgacgcctgacgtccgcttccagttcagccagctccggtttgagtaaatccgccgggcggcaggtcaccggagcgcccccttccagcacgcgggcctgtaacgcggcgttcaccggcaccggcgtgtggccgtattcgcctttcagaatgccggccgtttctttggcaatggtcttgtagcgttcgcccgtcagcacgttgagcaccgcctgggtgccgacaatctgcgaggtgggggtcaccagcgggataaagccgaggtcctcgcgcacgcgggggatttccgccagcacctggtcgagtttgtccgccgcgttctgctgcttcagctggctttccaggttggtcagcatcccgcccggtacctgcgccaccagaatgcggctgtcgtagcccttcagctggccttcaaaggcgtggtattttttgcgcacctcgcggaagtaggcggcgatattttccagcttcaggatatccagcccggtgtcgtgctcagtacctgccaacgtcgccaccagcgcttcggtggccgggtggccgtaggtggcgctcatggaggaaatcgccgtgtccacgccgtcgacgcccgcctcgatagccttcagcagggccatctccgccatcccggtggtggcgtgacagtgcaggtgcaggcgcacctcaaaacgttttttgatttcgctgaccagctcatacgccgccatcggtgtgagaatgccggacatatccttgatggcaatcgagtcaacgccggtttccagcagttgctccgttaaatccagccaggtctgcagggtgtgcgccgggctggtggtgtaactcagggtcccctgggcgtgcgcgccgtggctgcgcaccgcctgtaatgcggctttcatattgcgcgggtcgttcatggcatcgaagacgcggaacacatccatgccgtttttcactgcccgttcgacgaagcgctccaccacgtcatcggcgtagtggcggtagccgagcaggttctggccgcgcagcaacatctgcagcggggttttgggcatggcttttttgagttcgcgcaggcgcagccacgggtcttcgccgagaaagcggatacaggcgtcaaaggtggcgccgccccagcactccagcgacccgtagcccacgtcatcgagcgcggcggcaatcggcagcatgtcatcaaggcgcaggcgggtggcgaacagagactggtgggcgtcacgcaggacgacgtcggtaatggcaatggtcatggatccctccgggaaattaaacgtggtggcggtgatggtgaatggcggcggcaatcaccggctttaagcgggtgaagtcgtccacgacgggaacggcgcgcggtgcgggcgcggcgacgggttccgggaagaagcgagtaatcacggcagacatgccgcgaatggcaaagatgagcaggaacagaaagctcagtacgaaccccatccctaaaaacatcagggtgaaaccttcacccagtagtacagcttcgttcatgaatcattttccataatgagaggcacgacggtggccttgacgacaaccttcctggtgaatccggctaaggagtagagtggatttcccttggccacctctggctttggcctctacttttctccaggtcgtttgctgccaagacaccgccgtgcgtttttttacaccatcatgctgaacacgatgctagcgataaccagcacaataccgccgcccagacgagaggaaatttgtgcatatgaaatgaggttcatacggttacaggcggagagcacttccagatcgccggagccgccgcggttggccatacaaagacccgcagtaatggatgattcaatcgggtagaagccaatcaaccagcccccgatagctgcgccaacgactgcgccgaccacaatgattgcggcgataactacgttcgcgaacgtcagggcatcgatgatctcttgcagatcggtgtagcaaacacccacacctaccatcagcacccacagtagctgtttggagaagaagtcagaaagacgtttcgccccggctttaatctccggtgagcaaagacctgatgcgttcagcgcagcaacaatcaggaccatccaggcgaagtagtgaatagagacgccgccgatgcttggcagaattttcttggcaacaacataggccagcaggaagcaggtggtggatagcaccatgccaaccgccgtttcacgatgggtaatctgaccggccttttcatcatcttcggttttgaaggaagccttacgaaccaactcgccttcaccgctaagccaggtgtattttttgcctatcatatcgaggagggcggcgaaaataatggcgaagatattcgcaatggtcagaatagcaatagccgttgagtaatactcttcgcgagaacgtccggtaaccgagtgataaatttcagacagaggcacggcgcccgcgccgttaccaccgcccataatcggcagaacgtacagcatcatgatacggtcgaccgggataccgaagcacagaccaatgacgataccgaaaagggacgcgccgacaatcccggcgaggatggttgggatatagcccagcagtgattttaatagcagcttacggtttaccgacaggatcgcgcctgtgatcaacactgcgataaacaggttaaggaagttgcttttatccattacgttgctgatcgcatcaatttctttctgcgtaaatatgccagcatagacaaaataagctgcaaccagaaatatcataaccggtgcgccgccaatatatttattgaagatcggtaaacgtttgccgatttcaccaaaaatggcccccatcacaaacataagggcaaaaccacctactaagtcagtcggtatagcattataaaaatgagaaagtaataaagtaattaatgcaaaggcataaagcggtagcggcataccaaagattttgaatctgagtaaatcgctagccccctttttctccgtcgccgaagcctgggtcatgttggtcataaacattttcctgtgtattgatgggtaacaagacccgcgcatactaataaattcaatgaaccatgagatgtgactatcttcactgaatggttgtgtttttaattaatttaattatttttattaactctggttaattaaggaaataaaaaccataaagcttataaaagcaagggggaaagtgtgatgtctattccagacgagtaatacaaacgctggcgaaatatgcgacgttatttgctgacggatgcagaatagagtgaatctaatatttaaacgcatttatttgcaaaaggatgtattgcgtcgcgagtcggtcgccatgtttctggagggcgtgggactcgccctggaagacgattgtgaaatcgcggtatgcgcatattggcagggtgagatagtcgggtgcggttctctggccgggagcgtactgaaatgcatcgccgtttccccggttttacaaggggaagggctcagcctcaaactgctgaccgagctgcttacattggcctacgagttaaaccgcagcgagcttttcctgttcactaagccgcaaaatcggttgctgttttctggcgcggggttttggcccattgcgcaggcaggtgagctggcggtgttaatggagaacagcagtgaacggttagcgcgcttttgtcgccaactggcgctttatcgtcaaccgggaaaaacgatcggcgccatcgtcatgaacgccaatccgtttacattgggccaccgttatctggtggagcaagcggctgcggcctgtgactggttgcatctgtttgtagtcaaagaagatgcttcatttttttcctataccgaccgttgggcgctgatcgaacaaggaatcgcgggcattgacaacgtcacgttgcattccggctccgcttatatgatctcgcgtgcgacgtttcccggctatttcctcaaagaaaaaggggttgtggacgactgccattgccagatcgatctgcaactcttccgtgaacatctggctccagcgctggggattacccatcgttttgtcggcagtgaaccgttttgtcctctgacctgtgcctataaccagcgaatgcacgacattttgcacgatccgaagcgtagcggcccggttattgaggtcgtcgagctggcgcgggtggagaaaaacggcgcggctatttccgcctctcgcgtcagaaaactgtatagcgaacgtaattggtcggcaataagcgcgctggtgcctgctggcaccctggcatatctgcagcggcatgccgccagacacactgaaaccatatgacgtaacaccgttaacaaggaacataactaatgaaaatcattaaagatgccctggcaggcacgctggaatccagcgatgtgatgatcaggattggtccatccagcgagccaggaattcggctggagctagagagtctggtgaagcagcagtttggcgcggcgattgagcaggtggtgcgcgaaacgctggcgaagctgggcgttgaacgcgcgctggttagcgtcgatgacaaaggcgcgctggagtgcattttacgcgcccgagtgcaggcggcggcgttacgcgctgcagaacaaacggaaattcaatggagtgcgttatgagaccacgtcgcagtatgttgtttatccccggcgcaaatgcggccatgttgagcacctcgtttgtctacggtgcggacgcggtgatattcgacttagaagacgccgtagcgttacgtgagaaagataccgcccgtcttttagtccatcacgcgcttcaacatccgttctatcaggatgttgaaaaagtggtgcgcattaatccactgaacacgccgtttggtctggccgatcttgaagccgtcgtgcgtggtggcgcggatatcgtgcgtctgccgaaaaccgacagcaaaaacgatgtgctggagctggaagcgcaggtcgaacggatcgaacgtgaatgtggacgcgaggtcggcagtaccaggctgatggcggcgatcgaatcagcgaaaggcgtggtcaatgccgtcgacatcgccacctccagcccgcgcatggtggcaattgcgctggcggcatttgattacgtgatggatatgggcaccagccggggcgatggcaccgagctgttctacgcccgctgcgcagtgctgcatgcggcgcgcgttgcgggtattgccgcctatgatgtcgtttggtcggatatcaataatgaagaaggcttcctgaaggaagtgcagttggcgaaagggcttggttttaacggtaagtccttagtgaacccacgtcagattgagctgttacatcaggcttattctccgacacgtaaagaagttgagcatgcgtatgaggtgattgccgccgctgaagaggctgagtctcgcggtctgggcgtcgtttcactcaacggcaaaatgattgacggcccgattatcgaccacgcgcgcaaagtggtggcgctgtcggcttccggtattcgtgattaaggaaggaaccatgaaagagactgtaaccatgctcaaccagcaatatgtcgtaccggaaggattacagccctaccagggggtaacagcgaacagcccgtggcttgccagtgaaacggaaaagcgtcggcgtaaaatttgtgactcgcttgaagaggctatccgtcgttccgggcttaaaaatggcatgacgatatccttccaccatgcgtttcgtggtggcgacaaagtcgtcaatatggtgatggcgaagctggcggaaatgggattccgcgatctgacgcttgcctccagctcattaattgatgcccactggccgcttatcgaacacattaaaaatggcgtggtgcggcagatttacacctccgggctgcgcggcaagttaggggaagagatctccgctggcctgatggaaaacccggtacagatccactctcacggcggccgcgtaaagctgattcagagcggtgagctgaatattgatgtcgctttcctcggcgtgccgtgctgcgatgaatttggtaatgctaacggctttagcggcaagtcacgctgcggctctttggggtatgcgcaggttgatgcgcagtacgctaaatgtgtggtgctcctgactgaagagtgggtcgaattccccaattatccggccagtatcgcgcaggatcaggttgatttgatcgtacaggtggacgaagtaggggatccggaaaaaatcaccgcgggtgcgattcgtctgtccagcaacccgcgtgaactgttgatcgcccggcaggcggccaatgtgatcgaacactcaggttatttttgtgatggtttctcgctgcaaaccggcaccggtggcgcttctctggcggtcacccgtttcctggaagacaaaatgcgtcgccacaacattacggcgagttttggcctgggtgggatcaccggcaccatggtggatctgcatgagaaagggttgatcaaagcgctgctggatacgcaatcattcgatggcgatgcagcccgttcgctggcgcagaacccgcatcatattgaaatttcgaccaatcaatacgctaaccccgcctctaaaggcgcggcatgcgaacgcctgaacgtggtgatgctgagcgcgctggaaattgacgtgaattttaacgttaacgtgatgaccggttcaaacggcgtactgcgtggcgcatcgggcggccatagcgatacggcagcaggggccgatctcaccattattaccgcaccgctggtccgtggccgaatcccatgcgtggtggaaaaagtgctgactaccgtcacgcctggggcaagtgttgatgtgctggttaccgaccatggtattgcggtgaaccccgcgcgtcaggatctgcttgataacctgcgtgctgcgggcgtggcgctgatgaccatcgaacaactgcaacagcgcgctgagcaactgaccggtaaaccgcagccgattgagtttaccgatcgggtggtggctgtggtgcgttatcgcgacggttcagtgattgacgtgattcgccaggttaaaggctgatgaagggcacagacctgttgtacctgggccaggcagttacgctggaggagatgctacaagcgcgcgataaacgtgccgccaggcagcgtcaggcgttgaactgctatcggctaccgttgatttccctcacgctggttgcaccgggcgccgttaaaaactcagcggtctggcggcgtgtcgccgattacgcaattgccgaaatactggcgctttgcgaacagatggagtgggtcaacgtctgggaaatgcaggtaaatgaacgcagcggcccggaatggatggcagcggtctgtgcgccggcaatggcgttgaaacagcacatgtcgacactggagatgagccatccgttagggcggctttgggacatcgacattattgatagcgacggtaagtcgctatcacgccgtgaactcgggcatcctgcccggccatgtttgatatgccagcaggatgctcatctctgtgcccggggcaagcatcacacccttgaccttttgttggatgaaattgcacgaaggattgaatgctatgaacgtgagcgttgtgactgaacggcgtacgccagcgtactcatcgctggcggctggcgaacttaatgggttggttgcaagagcgctgctgacggaagccaggctgacaccaaaacccggtctggtcgatattcgtaattcgggagcgcatagggatatggatctggcggcatttgaacgtagcactaccgccattgctccgtggatggaaaagttttttatcatgggcaacaacacggcggcgctggcggcagaaaatgtcctggtgatgctgcgtccgctggggatggcctgtgagaacgatatgctacaggcgaccaatggtgtgaatacccatcgcggggcgattttcgcttttggcctgctgagcgcagcgattggccgacttctcgcgcggggagaaccgttggagcaaaatcgtatctgcgaccaggttgcccgcctgagtcggaatattgttgcccacgagctctcagcaaaaaaagcgggaaaactgacaaagagtgaaacccatttccagtgttatggcctgtcgggcgcgcggggagaagcggaaagcggttttcgaaccgtcagaacgcaggctttgccggtgtttaaccgggtcgtgcaggagcatgacgatacccatcttgccctactgcaaacattgttgcatctgatggcgtggaatgatgataccaatctggtgtcacggggaggcctggaagggctttactacgtgcagcagcaggcacaaaaattgttgtggcaagggggcgtattggttgaggggggcattgaagcgatgcagtccctcgatgatgaactcatcctgcgtaacttaagccctggcggtagcgcggatttactggcagtgacctggtttttaagtcattttcctgccggttccctctatcctgagtaagtttctcttctttcattctctccagcaatgattcatcctgcgggatgaatcatgtcttttactgatatcgctccctgtttatcattaatttctaattatcggcgattttagatggcggcctccgggcgcgctggttactctgaaaacggtttacgcaatttttacaaaagagaatagctatgcatgaagcacaaatccgcgtcgccattgccggcgccggtggccgcatgggacggcagttaatccaggccgccatggcgatggaaggtgttcagctgggtgccgcgctggagcgcgaaggctcttccttgctgggcagcgatgctggcgaactggcaggggcgggaaagtccggcgtgatcgttcaaagcagccttgaggcggtaaaagatgattttgacgttttcatcgattttacccgtccggaaggcacgttgacgcatctggcgttttgccgccagcatggtaaagggatggtgattggtactaccggctttgacgacgccggtaaacaagccattcgcgaggcgtcacaagagattgcgatcgttttcgccgcaaactttagcgtcggcgttaacgtcatgctcaagctgctggagaaagccgcgaaggtaatgggcgactatagcgatattgaaattattgaagcgcaccaccgccataaagtggatgcaccgtcgggtacggcgctggcaatgggcgaggcaatcgccggggcgctggataaaaatctgaaggactgcgcggtctactcgcgtgaaggttataccggcgagcgcgtagcgggcacgattggctttgcgaccgttcgggcgggcgacatcgtcggcgaacataccgcgatgtttgccgatattggcgagcgcgtagagattacgcataaagcttccagccgcatgacgtttgcaaatggcgcgttgcgatcggcgttatggctaaaaacgaagaaaaatgggctatttgacatgcgggatgtgctggggctggatgtattatagcgactaaataccttcgtgatgtggttgtggtaatcaagattaattgattacaaagggcaatatattattgcccttttgtttttgccccccggttattcggtcagataaataacgcctttcaccattcatgtttcgacagtttcttcgcccacggcatgttctgccgttgttttcgcgttaagaatagtccgtttaaagacatccgggccaacggcatccatttgcgtgacgtaattgccattacgataaatgcggttaattggcccttcagacgcatcggtacgggtcattacgttcaacgggaaaaaattactgcctgaactgacgttagtcatattcagccgcagcgccttaccgtatgcaaaaggcacctcgaccagactgataagactgatatccatcggagggggagtgctgttcctcggggggggcgttttatctcttttgcttcaataggttggcttttttatgctgtagtgaggctggttgtggtccaatcgtatgtgcctgtcttaaagaaaaagaagctggatctttatatcgcgattgtaattcttattacattgtcttaatttgctgttttttgttgattttatgatgcatttgatttgttttttatatttttaatatattgatttttaaaatttttttgtcgttaactttcttgattttgaatttttatgcatttaatggcattgatggctattaagtgagtttttatcgttgttttttgttgttttaatgtcaaatttgaccatttggtccactttttatcatgccagccagttttttgcgaactcaaggaagcgcaagcgttttctatcgtaacttagttgatctttttgcctcttaaacagaataacttccttataatgtgcaaaataacataaaaaacaccctctttaagttgacttttatccggcttaacttcagaatgccgccgtttgccagaaatccacgggtaagcaaatttgcattgcttcatactgactgaatgaattaatatgcaaataaagtgagtgaatattctctggagggtgttttgattaagtcagcgctattggttctggaagacggaacccagtttcacggtcgggccattggggcaacgggttcggcggttggggaagtcgttttcaatacttcaatgaccggttatcaagaaatcctcactgatccttcctattcccgccaaatcgtcactcttacttatccccatattggtaatgtcggcaccaataaagccgatgaagaatcctctcaggttcatgcgcaaggtttagtgattcgcgatctgccgttgattgccagcaacttccgtaacaccgaagacctctcttcttacctcaaacggcataacattgtggcgattgctgatatcgatacccgcaagctgacccgactgctgcgtgagaaaggcgcacagaacggctgcatcattgcaggcgatagcccggatgcgaagctggcgctggaaaaagcgaaagcatttcctggacttaacggtatggatctggcgaaagaagtgaccacggcggaaacttaccgctggacgcagggtagctggacgctgaaagacggtttaccggaagcgaaatctgaggatgacctgccgttccatgtggtggcctatgatttcggcgcgaagcgcaacatcctgcgtatgctggtggatcgcggctgccgcctgacggtggtgccagcgcaaacctctgctgaagaggtgctgaaaatgaatccggacggcatcttcctgtcaaacggccctggcgacccggctccgtgcgactacgcgattactgctatccagaaattcctcgaaaccgacattccgctatttggcatctgcctcggtcatcagctactggcgctggcgagcggtgcgaagaccgttaagatgaagttcggccatcacggcggcaaccatccggtaaaagatatggacagaaacgtggtaatgatcaccgcgcagaaccacggctttgcggtggatgaagactcgctgcccgccaacctgcgcgtgacccacaagtcgctgttcgacggcaccctgcaagggattcaccgtaccgacaaaccggcgttcagcttccagggccacccggaggcgagccccggcccgcacgatgcggcgccgctgttcgaccactttatcgagcttattgagcaataccgtcagtccgcgaaataatcaggagtaataagagccatgccaaaacgtacagatataaaaagcatcctgattctgggcgcgggcccgattgttatcggtcaggcgtgtgagtttgactactccggcgctcaggcgtgtaaagccctgcgcgaagagggctatcgcgtcattctggtgaactccaacccggccaccatcatgaccgacccggaaatggccgatgccacctacatcgagccgattcactgggaagtggtgcgcaaaatcattgaaaaagagcgtccggatgcggtgctgccgaccatgggcggccagaccgcgctgaactgcgcgctggagctggagcggcagggcgtgctggaagagttcggcgtcaccatgattggtgcgaccgccgacgccattgataaagccgaagaccgtcgtcgcttcgatatcgcgatgaagaaaattggtctcgacaccgcgcgttccggtatcgcgcacactatggaagaagcgctggcggttgccgctgacgtgggcttcccgtgcatcatccggcctagctttaccatgggcggcaccggcggcggtatcgcttacaaccgtgaagagttcgaagaaatctgcgaacgcggtctggacctctcgccaaccaacgagctgctgattgatgaatcgctgatcggctggaaagagtacgagatggaagtggtgcgtgataaaaacgacaactgcatcatcgtctgctctatcgaaaacttcgatgcgatgggtatccacaccggtgactccatcaccgtggccccggcacagacgctgaccgacaaagaataccaaatcatgcgtaacgcctcgatggcggtactgcgtgaaatcggcgtcgaaaccggcggttctaacgtccagttcgcagtgaacccgaaaaacggccgtctgatcgttatcgaaatgaacccgcgcgtatcccgctcctcggcgctggcgtcgaaagccaccggtttcccgattgccaaagtggccgccaaactggcggtaggttacacccttgacgaactgatgaacgacatcaccggcgggcgcactccggcctccttcgagccgtccatcgactatgtggttactaaaattccgcgctttaactttgagaaattcgccggtgccaacgaccgtctgaccacccagatgaaatcggtcggagaagtgatggcgattggccgcacgcagcaggaatccctgcaaaaagcgctgcgcggcctggaagtcggcgccaccggttttgacccgaaagtgagcctcgacgacccggaagcgctgaccaaaatccgccgcgagctgaaagacgcgggcgcagatcgtatctggtacatcgccgatgctttccgcgcaggcctctccgtcgatggcgtctttaacctgaccaacatcgaccgctggttcctggtgcaaattgaagagctggtgcgtctggaagagaaagtggctgaagtcgggattactggcctcaacgccgacttcctgcgtcagctcaagcgtaaaggttttgccgatgcgcgtctggcaaaattggcgggcgtgcgcgaggcggaaatccgcaaactgcgcgaccagtatgacctgcacccggtctacaagcgtgtggatacctgcgcggcggaattcgccaccgacaccgcctatatgtactccacttatgaagatgagtgcgaagcgaacccgtccattgaccgcgataaaatcatggtcctcggcggcggcccgaaccgtatcggccagggtatcgaatttgactactgctgcgtacacgcctcgctggcgctgcgcgaagacggttacgagaccattatggtcaactgtaacccggaaaccgtctccaccgactacgacacttccgaccgtctgtacttcgagccggtcacgctggaagacgtgctggaaatcgtgcgcatcgagaagccgaaaggcgttatcgtgcagtacggcggccagacgccgctgaagctggcgcgcgcgctggaagcggcaggtgtgccggtaatcggcaccagcccggacgccatcgaccgcgcggaagaccgcgagcgcttccagcacgcggttgaccgtctgaagctgaagcaaccggccaacgccaccgtcaccgccattgaacaggctgtcgaaaaagcgaaagagatcggctacccgctggtggtacgtccttcttacgtgctgggcggtcgggcgatggaaattgtctatgacgaagccgacctgcgtcgctacttccagacggcggtcagcgtctctaacgatgcgccggtgctgctggaccgcttccttgatgacgcggttgaagtggacgtggacgctatctgcgacggcgaaatggtgctgattggcggcattatggagcacattgagcaggcgggcgtacactccggcgactccgcctgttccctgccggcctacacgctgagccaggaaattcaggacgtgatgcgccagcaggtgcagaagctggccttcgagttgcaggtgcgcggcctgatgaacgtgcagtttgcggtcaaggacaacgaagtctacctgattgaagtcaacccgcgtgcggcgcgtaccgtaccgttcgtctccaaagccaccggcgttccgctggcgaaagtggcggcgcgcgtgatggccggcaaatcgctgaccgagcagggcgtgacccaagaaattatcccgccgtactactcggtgaaagaagtggtgctgccgttcaacaaattccccggcgttgacccgctgttagggccagaaatgcgctccaccggggaagtgatgggcgtgggccgtaccttcgcggaagcgttcgctaaggcgcagctgggcagtaactccaccatgaagaaacagggccgtgcgctgctctccgtccgcgaaggcgacaaagagcgcgtggtggatctcgccgccaagctgctgaaacagggctttgagctggatgccacccacggtacggcgattgtgctgggcgaagccggtatcaacccgcgtctggtgaacaaggtgcacgaaggtcgtccgcacattcaggaccgtatcaagaatggcgaatatacctatattatcaacaccaccgcaggtcgccgcgcgattgaagactccagggtgattcgccgcagcgcgctgcagtataaagtgcattatgacaccacgctgaacggcggttttgccacgacgatggcgctcaatgccgatgccaccgagaaggtaacctcggtgcaggaaatgcacgcgcagatcaaaaagtcgtaaacaaagggtccggcggatattgctctaaccggacctgtaatataatgttgaaagggtttctgtaaagaaaccctttttttgtctatggaaaacccccagctaggctgggggttccggaaagctttcagctttaagccagttattaaaaccccttttgatttgttaaaacatcttgcggtctggcaactgcaaaagttcaacaagaaatcaaaagggggtcccaatgggggacgaaaagagcttagcgcacacccgatggaactgtaaatatcacatagttttcgcgcccaaataccgaagacaagcgttctatggagagaagcgtagggcagtaggcagcatattaagaaaattgtgtgaatggaaaaacgtacgaattctggaagcagaatgttgtgcagatcatattcacatgcttctggagatcccgccgaagatgagtgtgtcgagtttcatgggatatctgaagggtaaaagtagtctgatgctttacgagcagtttggggatctaaaattcaaatacaggaacagggagttctggtgcagagggtactatgtcgatacggtgggtaagaacacggcgaagatacaggactacataaagcaccagcttgaagaggataaaatgggtgagcaattatcgatcccgtatccgggcagcccgtttacgggccgtaagtaacgaagtttgatgcaaatgtcagatcgtatgcgcctgttagggcgcggctggtaagagagccttataggcgcatctgaaaaacctccggctatgccggaggatatttattatcttgcgtaaggtcattcctggagaagtccgtttccgtaaccacattttcaatgtaataagcacgatattgctcacactaatcaatatttaagtcgcatactatcttgcatatccacaattttaatatggcttagtttttattagtttggacaggccgtagccagatttttaatttgtgaaatggtgtgcttatgtgtgaaaaatatgttgaaagaccgctttatttgttaattgctgactggatgatggcagagaaccgatggatcactgccagggagatttcccgtcaatttgatattgaacattgcaaagcaattaatacgctctcctatattctgtcagaagtgggggaaattgtttgtgaagtgaagatgatccctaaccaaattgcaggacgaggctgccagtgccagcgtctggtgaaagtcgtgagtatcgactctcaactctatcgccgattgaatcataatttgcaggaaagaaaagtgagcgtggcgaaagcgccgcggctgtctgccgttccccccacagagctaaaccgtgagcagaaatggcagatgatgctctccaagagtatgcgtcgctaattgtctgtttacctgctggcggggtaaacggtaattgacgcgtaggccggataagcgtgagcgcatccggcatcaattactgtgctgattttggcttcacgtccgtcgtgcctttcaggcgcggtcggttttcttcggcctgcgttaacggcttcgtttcagataaccccgttcgacaacggatcgcaagatcctgatattctttggtattgaggtgtttccagtgcagctcctggtccgtaacctggcgtagtacgcgcgccggtgatcccaccaggagttgccttgcctcaccctgaaatccggctttgacaaaactcatggcggcgacaatgctctcttcgccaatcactgcgccgtccataatgacgctattcatgccgaccagggcgtcccgtcccaccacgcagccatgtaaaatagcgccgtggccgatatggccgttttcatgcacgatggtatcggtatcgcagtagccatgcataatgcagccatcctgcagattagagcctgcctccaggatcaggcgaccataatccccacgcaatgacgcgagtgggccaatataaacaccggcgcccacgatgacatcgccaatcagcacggcgctggggtggacaaacgcgtccggatgcaccaccgggatcagtccttcaaaggcgtaatagctcatagttgtacctcggttttttgccggatggcggcgtaaacaccttatccggtctacggttgcgcatgtgctgtaggccggataagcgaagcgccatccggcatagtcacattaacgacctttccacaccggatcgcgtttttcggcaaatgcctgcggtccttcgagcgcatcttctgaatgcagcaccgacggataatgcttcagtacgccgctgcggatgtagcggtagccttcttctaccggcatttcgctggtcgcgcgataaatctctttcagcgccgcgatagccagcggggcgctattgaccagttgttgcgccagttcgcgcgcactctccatcagttcgctctggctgacaacgcggttcacgactccccaacgcagcgcttcttcggcgctcattcgtctgccggtcattaccatttcgttgacgatagccggtggcagcagcttaggcagacgcaatacgccgccgctgtcaggcacgatgccgagcttggcttccggcagcgcgaagctggcgttttcggcgcagacaataaagtccgccgccagcgccagctcaaaaccgccgccaaacgcgtagccgttcaccgcggcgataaccggcttatcgaggtcaaatatttcggttaaaccggcaaagccgccgggaccaaaatcggcatccggcgcttcaccttccgctgccgcttttaagtcccagccagcagaaaagaatttctccccgccgccggtaatgattgctacgcgtaattccggatcgtcacggaaattaagaaaagcttcacccattgcaaagctggttttggcgtcaatggcattcgctttaggtcggtcgagggtaatttccaggatcgggccgttacgggtcagatgtaatgactcactcatagttcatctccagataaatagttttccggcgggagggattcctgccggaaggtttatttcagattttttttgattatttttcctgaacagttgcgcggcaggtcggttctgatctccataaaagagggaaccttgaacttcgccatattgttttcgcagaagctgaaaaactcggcttcgcttaatgtttcaccttcattaaggacaataaacgctttaatggcttcatcacggatcgcgtctttaataccaaccaccacaatgtcctgaattttcggatgcgcagaaataatattttccagctcgacgcaggagacattttctccgccgcgtttaatcatgttgcagcgcctgtcgacgaaataaaaatagccatcctcatcctgatagcccgaatcaccggtatgtaaccagccctcaggttccagcgctttggcggtagcctccggctgcatgtaatactctttgaagatagtcttgccggggatgcctttaatacagatttcgccaatttctccggcgggcagcgggcgattttgatcgtcgcgaatttcagcttcatagctaaaacccacgcgaccaatggaaggccagcgccgtttgtctccgggacggtcgccaataattccgacaatggtttcagtcataccataagaggtcagcagcctgacgccaaagcgttcggtaaaatcgtctttttcctgctcggataaattgagatagaacatcacttcgcgcaggtgatgctgcctgtccgttggtgcggcgggctggaccatcagcgtgcggatcatcatcgggatgcactcggtcaccgttgcctgatatttacgtacctgatcccagaaggccctggcgctgtacttctctagcagcacaaaggtgctgccggcggaaaaggctggcattgcggcggtacactgacagtcgatatgaaaagcgggcatcaccgtcatgtacacgtcatcatcgcgcagggcgatttgccaggcagagtagtagcctgcaaaacgcaggttgtagtgggtaattaccacccctttaggccgtgaggtggtgcctgaggtaaacagaatttccgccgtatcgtcagtggataacacgggcgtatagcacagcgtggccgactggcgtgcttgtagttgggtaaagtggctcacgccgtcgtcagccggaagctgctcgccaatcagacagatatgattaagcggagtgctattgtcctggcgtatttcacggtacataggataaaactgggcgctggtaaccagcagactcacctggctgttttgcaggatccaggcgctttcttcgcccagtaagcgggcattaatcggcaccataatggcgccgatttttgccagtccaaaccagcaaaagatgaattccggacagttatccagatgcagcgcgaccctatcacccttgcggatccctaaggaataaaaaaggttcgccgtgcggttaatctcttcattgagcgaagcatagctaaactgccgaacgattccctcacaggattcgaaaattaacgccgttttatctccgtacaccccggccaggtcgtcccacatctgacgtaagttttgtccgccaacgatatccatattgctttatccactgaaatcaggcgtgagcgctaaccggaaaaccgattagcgcatcgcgtttaatcctcaactttggccaggcctttgccgaccagttccttaatatctgcttcgctataaccaatgtttttcagaatggcggcggtatccatgccgtgtgacggcatgccacgccagattttccccgggttgtttttaaatttcggcatgatgttcggccctttacaggtgcgaccgtccattgtttgccactgagtaatcgattcgcgggcaacgtactgcgggttaccttccagttccggaatggtgagcaccttcgcacaggcgatattcagttcagcaaaacgcgcctgaacgtcggcgatggtgtgtgttgccagccaggcgtccagtttctcttcgacgagcgggccgtaagggcattccacgcgatggatgagttgtgtgccttccggaacttccggcgtaccgagaatgtgggccaggccaatatctttaaaacactcgttgatttgcgtgatgccgaccaactccatgacgatgtaaccatcggcgcatttatacaggccgcaaccagcgtagtaggggtctttccctttcgtcatacgtggacagatttcgccgccgttgaagtagtccatcatgaaatactgacccatgcgcagcatcacttcgtacatggcgatatcgatgctttcacctttacccgtttcgcgtactttgtgcagggctgccagcgcggctgtcgtcgcggtcatcccggagaagtaatcggcggtatacgggaaggctggcatcggctgatcaacgtcgccgttttggatcagataaccactgaatgcctgcgcgatggtgttatacgccggaagattggtgtactcctcggtaccatactgaccgaagccggaaaggtgggcaatgaccagtttcgggttatgttcccacagcacttcatcagtaataccacggcgggcaaaggccgggcctttactggcttcaatgaaaatatcggtggtttccatcagtttcagaaacgcttcccgaccttcatctttgaaaatattcagcgacagggcgtgcaggttgcggcgtgagagctgcgggtagttaggctgtacgcggatggtatcggcccatgcgacgttttcaatccagataacctctgcgccccattcggcgaacatctgtccggcgaatggaccggcgatttcgattcctgaaaaaacaacgcgtaccccagcaagcgggccaaaggttggcattggtaaatgattcatcatttttctcctggcattttttgcggtatgtaggccggataagcacagcgccatccggcatgattgcctgatggcgacgccccgcgtcttatcaggcctacaagggatcgattagcggtattgcttaagtaccgcacgacccaacgtcaggatctgcatttcatcagaaccaccagaaacacggtcaacgcgcaggtcacgccagaaacgcgtgatgcggtggttgcccgcgataccaacacctcccagtacctgcatggcggtgtctaccacttcaaacgcggcgttggcgcagaagtatttgcacattgccgcgtcgccggaggtaatggtgccgttatccgctttccacgcggcttccagcagcatatttttcatggagttcagtttgatcgccatatgcgcaaacttctcctgaatcagctggaaacggccaatagcttcaccaaactgcacgcgctgattcgcgtaacgcgcagcgtcttcaaaagcgcacattgcggtaccgtagttggtcagcgcgacgaggaagcgttcatggtcaaactcttctttcacgcggttgaagccgttaccttcccgaccgaacatgtctttctcgtccagttcaacgtcgtcaaaggtgatttcacagcagctgtccatgcgcagaccgagtttctccagtttgttgaccttgatacctgctttgctcatgtccacaaaccactcggtgtaaaccggtttatccggcgatgcaccgtctctcgccatgaccacgatgtacggggtataggcgctactggtgataaagcacttactgccattgagataaaccttaccatttttgcgcgtataagtggttttcagactaccaacatccgatcccgctcctggttcggtgatagcagagttccacatctgcttaccggtgccccggaacgccatgattttatcaatttgctcctgagtcccttcacgcaggaaagtgttaaaacctcccggcaattggtacaacacgtaagttggcgcgccaagacgtcccagttccatccagacggcggcgacggtaacaaaacccgcttccagaccgccgtgttcttccgggatcagcaggctatcaatacccatatccgccagcgcttttacaaaacgctcagggtagacgctgtcacgatcgcactcggcaaaataagcttcccagttctcactggccatcagttcgcgaataccggcgacaaacagctcctgttcgtcatttaagttgaaatccatctttcagcctcttgatcaattgggttaataagaattacttgtctttccagtgcactttggcgtctttaataaaggacagcgtcaccataatgttgacgaagaacagcggacatcctccggcgataatcgcggtctgaatcggcttcaacccacccagcgccagcagaacgataccgatgatgccgaccagcactgaccagccgatacgcactaacagaggcggctcttcaccatcgcgaacttcgcgacaggtcgacatcgccagggtgtaagagcaggcgttaatcagcgtgacggtggcaataaagcagaggatgaagaagccccacatggtggcggtgctgagcggcaaggcggcccaggtttcgataatggcgcgcgccacgccgtgttgctcaatcagttgcggaatgttgaggatgcttttatccatcagcagcagcgtgttactgcccagcactgtccacaggatccaggtagacgcggtcagacccatcaccatcccgaagcacagctcacgtacggtacgaccacgggaaatacgggccaggaagatactcatctggatggcgtaaataacccaccacgcccagtagaaaacggtccagccctgcgggaagccgcctttaccgatggcgtcggtatagaacagcatccgtggcaggtgcattaacagcatcccgacggagtcggtgaagtagttcatgatgaagctggcgccgctgacgataaacacccagccgagcatcaggaagctcaggtagctacgcacatcgctggcgattctgacccctttttgcaggccgcaggccacgcaaatcgcgttcagaatgatccagcaggtaatgatgatggcgtcgagttgcagcgtatgcggaataccgaacagccattgcatacactcggtgaccagcggggtagccagaccgaggctggtgcccatcgcgaagatcagcgccaccaggtagaagttatcgacgatggtaccgaacaaccctttcgcatgcttttcaccgacgagcggtaccagcgtggagctggggcggatgacatccatcttgcgtacaaagaagaagtaggcgaaggccacggaaaggaagctataggttgcccacggcagcggcccccagtggaacaggctgtacgccaggcctatctctttcgcgcccgtggaatttggttccaggccgaacggcggggtggagatatagtagtagatctcaatagagccccagaacagaaccgcagcggatgtacaggaggcgaacatcatgaaaatccagctggcggtgctaaactccggtttttcgtcacctaatctctttttggcataggggccaaaaaccagccagaaccagccgaagagcatgacgaccatataccattcaaatgcccaaccccagacgttggtgacataactgaataccgcattaataacgacgttagcggcatcaagatctctgactgttagccagcaaagtatcccgacaattattaatggcggaaaaaaaaccttcggttcaattcccgattttttcttttcatttttcataagtgaattccagtgtgaaaacgaaatttatttagcgtgccagtccatgaacgtttgtttatttattattaatgatttgttgataagtttttaacctctgggacgcctcaatgagtaactcatgatgggtattcacttcgggtgattctgttatcttcgtcacacttttttgcgttgattattttgtgtctaaattttgatttttgctttatttatcaattgattggttgtggttttttaacttttttaagtatctggcgttcaatattgttgagccagcaaacaatattgaaaattttcatatttggcatatttctttcaatattggtgaggtgcgtaacactattgaaagttacgaatatcaatgtgtgacattttcaatattggtgattaaggttttatttccgaattaaagagcgtgatatctgtatttaacaccgccgatataaatacgtttccttcatgatttctggagatgcaatgaagataattacttgctacaaatgcgtacctgatgagcaggatattgcgattaataatgctgacggaacactcgatttcagcaaagcggatagcaaaatcagccaatatgatctgaatgcaattgaagctgcttgccagttaaaacagcagttgggagacgctcaggttgtcgccatgagcgttggcggcaaagcgctgactaatgcaaaagggcgcaaagatgtcctctctcgtggccctgatgaactgattgtggtcattgacgatcaatttgagcaggcgctgccgcaacacaccgctaccgcgctggccgccgccgcgcaaaaatcaggtttcgatctacttatctgcggcgacggttcttccgatctttatgctcagcaggttggtttgctggtgggcgaagcgctgaacattccggcgattaacggcgtgagtaaaatcctctctcttaccgacagcacattgacagtagaacgcgaactggaagatgaagttgaaacgctgagcatcccgctcccggcggtgatcgcggtttccaccgacattaacaccccacaaatcccttcgatgaaagccattcttggcgcggcgaaaaaaccggttcaggtctggtcgcctgcggatatcgggctgaacagcgtacccgcgtattccgcacaacaggttgccgcaccgaagcagcgcgagcgtcagcgtgtggtgattgaaggtgacggtgaagaacaaatcgccgcgtttgtcgagaatctgcgcaaaatcatttaattatcaggggatgttatgaacaaattttccagtgtctgggtattcagcgataccccttctcgtctgcccgaactgatgagtggcgcgcaggctgtaggtgaaaaagttaacgcgttcgtactgaacgaagcagacagcgcgacagcatgtcatttgggcgcggatcatgtctggctgctcagcggcaaaccagaagaccgcatgatcgaagactacgctgctgcgatggctgagactattcgtcagcatagcgagggcggcgcggtgctgctgccgaatacgcgtcggggcaagctgttggcggcaaagctgggctatcgcttgtcggctgcggtttccaacgatgccagcgacgtctccctgcaggatggaaaagcggcggttaaacatatggtctacggcggtctggcgataggggcagaaaccatcgcttcgccgtttgccgtgatcacactcagcagcggaacgtttgacgcacaacaaccggatgcttctcgcagcggcgagatgcacaccgtgcagtggcaggctccggccactgccgtgacccgcaccgcaacccaggcgcgtcagagcaacagcgttgacctcgacaaagcgcgtctggtggtcagcgtgggacgcggcatcggcagcaaagagaatatctcgctggccgaagcgctgtgccagacgattggcgccgagctggcctgttcccgcccggtggcggaaaacgagaagtggatggagcacgagcgctacgtcggtatctccaacctgatgctcaaacctgaactgtatctggcggtggggatctccgggcagatccaacacatggtcggcgccaacggcgcgcagacgattttcgccatcaacaaagataaaaacgcgccaatcttccagtatgcagattttggcatcgttggcgatgcgctgaagatcctgcctgcgctgacggctgccttagcgcgataaaccatttcgggcaggatgcgaaggtatcctgccgctgacaggagtacgtatgtccgaagatatctttgatgccatcatcgtgggtgcaggtctggccggttcggttgcggcgctggtgcttgctcgcgaaggtgcacaggtgctggttatcgagcgcggcaattctgctggcgcgaagaatgtcaccggtgggcgcttgtatgcacatagcctggaacgcatcattcccggctttgcggatcaggcccccattgaacgcatgatcacccacgaaaaactcgcctttatgaccgacaacggggcgatgactatcgactactgcaatggtgaagatgcttcagcgtcgcaggtttcctattccgtcttacgcagtaaatttgacgcctggctgatggagcaggccgaagaggcgggggcgcaactgatcaccggtattcgcgtggataacgttgttcagcgtgatggcaaagtcgtgggcgtggaagccgatggcgatattctggaagccaaagtcgtgatcctcgctgacggggtgaattctctgctggctgaaaagctgggcatgaccaagcgtgttgaggcatcgcatgttgctgtcggcgtgaaggaactgatcgaattgccgaagtcggtcattgaagatcgtttccagttacagggcaacgaaggtgccgcctgtctgtttgccggagcgccgaccgatggtctgatgggcggtggcttcctgtatacgaatgaaacaaccctttccctggggctggtctgcggtcttcatcatctgaaagacgcgaaaaaatcggtcccgcaaatgctggaagatttcaaacagcatccggcagttgcgccgctgatcgccggtggcaagctggtggaatatgccgcgcacgttgtacccgaggcgggaatgaatatgcagcctgaactggtgggcgatggcgtactgattgccggggatgctgccggcatgtgtatgaacctcggctttaccatccggggtatggatctcgccatatccgcaggcgaagcggcggcgaagacggtgctttcggcgatgaagcgcgacgattttagcaagcagtcgctgggtgaataccgtcagcatctggacgaaggtccgatgcgcgatatgcgcatgtatcagaaactaccggcttttcttgataatccccgcatgtttaccgcttatcccgaaatggcggtcaatatcgcgcgcgacctgttcaccgtggatggctccgctccggtgcccatgcgtaaaaaaatcctgcgccatgcgaagaaagtgggcttcattaatctgatgaaagatggcctgaaaggagtgaccgtattatgacatctcccgttaatgtggacgtcaaactgggcgtcaataagttcaatgtggatgaagacagcccgcacatcattctcaaaaccgatcctgataaacaggcgctggaggtgctgattaaggcctgtccggcgggactgtataaaaagcaggacgacggcagcgttcgttttgattacgccgggtgcctggagtgcggaacgtgccggatcctcggccttgatacggcgctggaaaaatgggaatacccgcgcgggacgtttggcgtagagttccgctacggctaataagtacgaagttgtgcccccgttggccggataagatgcggtagcgtcgccatccggcaatcatgtggcgccaatgccggatggcggcggaaacgccttatccggcctacagatgcgctttgcccgtgttgaaacaggacatcaccatgcagcagcccaggaactttgatgaccttaaattctcctccattcatcgcagaattatgctgtggggaagcggcggcccgttccttgatggctacgtgctggtgatcattggcgtggcgctggaacaactgacgccgctattgcaccttgatgctgaatggattggcgcgctcggcgcggctacgcttgccggactgtttatcggcacctcgttgtttggctatatttgcgataaagtcgggcggcgtaaaatgttcctgcttgatattatcgctatcggcgttatctccgtggcgaccatgtttgtttccacgccgcttgaattactggtgatgcgcgttttaattggcattgttatcggcgcggattaccctatcgctacttccatgattacggagttttccaacacccgccagcgcgcgttctccatcggttttatcgccgcgatgtggtacgtcggcgcgacctgcgccaacctggtgggctactggctgtatgacatggaaggcggctggcgttggatgcttggcagcgcctttatcccgtgcttaatcattttgattggccgctttgacctgccggaatcgccacgctggctattgcgaaaaggacgggtaaaagagtgcgaacaaatgatgatcaaactgttcggcgaaccggtctgctttgacgatgagctgccgcaggagacccgcttcctgcagctgtttaaccgccgtcatttcccgtttgtactgttcgttgcggctatctggacctgtcaggtgatcccgatgttcgctatctatacctttgggccgcagatcgtcgggttactcggctgggagcaggggcgcaacgcggcgcttggcaatgtggtgattagcctcttttttatgctgggctgtataccggcgatgttctggctaaacagtattggccgtcgccctctgcttattggcagcttcgccatgatgactatcgcgctggcgctgctggggctggtgtcaaatctgggcatcatactggtcgtggtggcgtttgcggtatacgccttcttttccggcggaccgggcatactgcaatggctttatcctaatgaactcttcccgacggatattcgcgcttcggccgtgggggtcatcatgtcattaagccgcatcggaaccattgtctccacctgggcattaccgatttttattactcgttacggtattaataacgtcatgctgattggcgcgttgatttcgttagtcgggcttggcgtatcggtgatgtttgccccggaaacccgcggcttgacgctaacacagaccggaaacatgactttgcgcggaacgccatcggataaccctcgttaagagtgttctgcatttctccctgcttttcgccaataacgctacagttaacagtcacatgctaaaacaactgaaaagcagggagaacaccatgcaaaaacgtcttatgaccgcactgtttaccgcagcaacactattcaccgtcgcaggatgctcttctaaccaggcggttgaaaccacggatggcaaaactattgtcaccgacgggaaacccgaggtcgataacgataccggtatggtgtcttacaaaaacgccgccaccgggaaaaccgaacagattaaccgcgatcagctgaaaaatatgagcgagctggataattaattcaatcttttctggttagccgcgcaataatattttctctttatgcgcatccatttattcccatgcgaataaacggatgcctgaacaggcagggacgccggaaaacgtcgaaatacgttagaccattcgcccgtgttcccgctttccccaccgcgctgtccgcttacatgaggttacactcatcgacatttctctgaacagcggctcaacatttcccggaaaaaaacatatcgcagggcatttatccttatgattaggtataaatgatgaggtataaggaacaggagtctgtaatgaaaccaatacctttttatttgctcgcgctattttctgccgcctccggggctacggagataaacgtctgcaaagacctgatcggaacatggaaaaccacggcagataacccgccttataccatgacaatatcgccgccagtagaaagctgcggggaaaaatgtgtgaaactgaacgtgcagtatgaacttgacgtgactcaccgcaacgcgctttattgccatgaaggacaagagggggtaaaagggcagggacccatggtgatagcatttgaaggggcgtatggtggacacgctattggaacctataaccgacagctgcaattactttgggctggcgtaatatcgaaaaataaaaaggggaaatggataacgaaaatggaaaattactggttcaggcaggtaaaagcgcactaaacatcatcttaaaacagcccgcaaaaccgtcttattcacgaagggcttactgcctgcgcgcgcacattccaacggcttgcctgccccggatgaactgttgataaaaaagagggccagcatccgtttccagacggccctgagtggattgtgacgtaacatggcaccttgctggcgctctcttattatttcatgccagtgccctcgttatggcgcaatcagagctttatttcgtcgcatcgttataaacttcggcaacggcttcaaaattcggaccatgctcacgtgcagcgataatatggtaatattttccgcctttcgcatcggctaattctgacagtttttcgcgtagatcagagggtgaggaaatctgtccgccactctgggacacatttatggtgccgaccttaaccagtttgaagtggctgatttcttgtttagagacctgctctgccgcaagtgtgctgaatgaagcaaccgttgccagtaatgcggcggcaataatgcgttttttcatagttctgttcctgttgcattgatgataaggtttgcgcaatatcagtaatccgtaacgaaattatttatccccttcatacttcaggttgcttatgggttggctacggattactcggcccacccatgggcctcgccctgacgggccgtcgcacgcgacgttcaaatctgctcccggcaaatttgtcgctcacctcagtcacataattatctatgctcccggggactcactcccttgccgcctttaagcaactcgaattattttgggtaataacctcggttgattatctgaaaatagccttatttggtgtgaccgtcttttatcttgttatagtcacctctttatgttgttgtcaatgtaaaataatgcactgccagctaaaaagaaacttaaccccctgtaaataatagtttttatattatttcttttaatggcgtaatttttattgaatcacgcggcaatacgctagttttattcataagcaacataacagaattgagttatgttttaatttcccagagtgatattaccggttgtatgtctatggttgcgcggcctgttactgatagtgtttctttcggggcgattttattgtagcggcatagggtaatcaccgtagctgaagggaaaaggcacgaacacagcactatagagtatgtttaataatgtatttttttatgaagtaatgtctgcagttgtatctctaaaataaaaacaatgaacttttcatctaaataatttttcagtgaattatggttatttattaatatatttctaatttgaaatacaaatcaatttataacacatattcttacccggaaggcattgatacatatccacgcttcctcgtacagtaataaatgaatatgtgataaagttactgactacaggtataataatatgagtaataaaaaaaatctgtccgcagaagagacggatcttacgcgtaggaaactgttaaccagtgccggtattcttgccgcaggcggtatgttatccggcgcggtaaaggctgatgaaaaatgcgccgtcaaggcgaaaccggcgtgggataaaccgtttactggcgaaatcccggaaaaattgccagaaggatataatattctgttagtcgtgaccgaccaggagcgtttttttcctacgtttcctttcccggtacccggcagagagcggctcatgaaaacgggggtgacattctgtaatcatcagaataccagtaatgtctgtacgccttcccgctccgtattgtataccggcttacatatgccccagacaaagatgtttgataatttgggattaccctggatgccttatgaccttgaccccgctcttggaaccacaggtcatatgatgcgggaactgggatactatacggcctataaaggtaagtggcatcttacagaaaaactggagaagcctttgcctgacgaaaaagatgaggatattgatgtcggggatattcctgaaccagaattacataaaattatggaaaaatatggttttgctgactatcacggcatcggcgatattataggccatagtaaaggcggctatttttatgattcaaccaccacggctcagactataaattggttaagatgcaaggggcagcccttgaatgaccaacacaagccctggttcctggccgttaacctcgttaatcctcatgacgtcatgtttattgataccgataaagagggagaaaaggtacagtggcgtggcgagttggatcaggatgataataccctggcgcccacgcagccaccggaaaacgaactttatcaggcaagctggccgaactatccgctgccggcaaacaggcatcaatcattcaatgagcagggaagaccgccggcgcatcttgaataccagacggcgcgcgctgcgctggaagggcagtttcctgatgaagatcgtcgttggcgtaaactgcttgactactatttcaactgtatccgcgattgtgatactcaccttgaccggatattaaatgaacttgatgccctcaagttaactgataaaacgattgttgtatttactgccgatcatggcgaattaggcggaagccatcagatgcacggtaaaggcgcttccgtttataaagaacagatccatgtaccgatgattatttcccacccggcgtaccccggtaataagaaatgtcaggcgttgacctgtcatcttgatatcgcgccgacattagttggactgaccggtttgccggaagaaaaacagcaccaggcgttaggcaaccgcaaaggcgttaattttagcggattgctaaaaaacccggagagcgttgcggttaatgcggtgagaaatgccagcttatattgctatggcatgatcttgtataccgatgcccattatctccaccgcgttattgcgctacaaagagataaacaaaaaacggtggcgcaaatcaagcaggaaatatctcatttgcatcctgatttcagccatcgttcagggacgcgcatgattaacgatggtcgttataagtttgcacgctatttctcgctaagggagcataatacgccggaaacctgggaggatcttattaagtacaacgatcttgaactttacgatcttaaaaatgatcccgatgagaaccataaccttgctgctgataaacagaaatatcaggatctcattcttacgatgaatgaaaaactgaataaaattatcaaagacgaaattggcgtggatgacggcagttttatgccggatgcggcccatgagccgtgggatcttactattgagcaatttaaccgcatggcgaaagattaagagcctggcccattaggctattttattcgtcggcgatctggcatccagcgtgtctggaggttcagatgctgttggcgctgcgcttattgggtctgtatcatcatgtaatggattgatattacagtcattacaggcaaatttagcgcagcgccgcccgacaagaaggccttaaaccgattggtcagcgatttaaggctactatcatcaccgacctttccacaccggatcgcgcttttccgcaaacgcctgcggcccttcgagagcgtcttccggaggcaggacggcgccagctcctggctggcgttaattcaattttttctgattagccgctcaataatattcactattagcctggcgaatttgtcactacactttgtaataaaaaacagatcatcacaggctaatcatgatcctcattatttatgcgcatccgtatccgcatcattctcatgcgaataagcggatgcttgaacaggcagggacgctggaaaacgtcgaaatacgttcgctttatcacctctatcccgatttcaatattgacgttgccgccgagcaggaggcgctgtcgcgcgcgagtcttatcgtctggcagcatccgatgcagtggtacagcgtccctcctttactcaaattatggatggataaagtcctcacccacggctgggcttacggtcatggcggtacggcattgcatggtaaacatctgctgtgggcggtaacgaccggcggtggtgaaaaccactttgctatcggctcccatcccggatttgacgtcctttctcagccgctacaggcgacggcgctctattgcggcctcaaatggctgtcgccgtttgccatgcactgcacgttcatttgcgatgacgacaccttacaggcgcaggcgcgtcagtataaacagcgtttactggcatggcaggaggtgaatcatggatagccatactctactgcaggcgctgatctatcttggttcggcggcgttgattgtgccgattgcggtacgtttgggcttaggatcggtgctggggtatctgattgcgggttgcattatcggtccctgggggctacggctggtgacggacgccgaatctattctgcattttgcggaaatcggcgtcgtgctgatgttgtttgttattggacttgagctggacccgcaacggttatggaagctgcgcgcctcggtatttggcggcggcgcgttacagatgggggtctgcggcggactgattggtctgttctgtatgtttcttggcctgcgttggcaggtggcggaactgattggcatgacgctggcgctttcgtccacggctatcgccatgcaggcaatgaatgagcgtaacctgaccgtttcgcaagtagggcgtagcgcatttgcagtgctcttgttccaggatatcgcggcgatcccgctggtggcgatgattccgctgctggccgccagcggcgcatccaccacgcttggcgcgtttgcgctatcggcgttgaaagtcgcaggcgcgttggcgctggtggtgttgctgggacgctacgttacgcgcccggcgctgcgctttgtcgcgcgttctggtttgcgggaagtgttcagcgccgtggcgctatttctggtgtttggtttcggcctgttgctggaagaggttgggctgtcaatggcgatgggcgcgttcctggcgggcgttctgctggcgagttcggaataccgtcatgcgctggaaagcgatattgaaccctttaaggggttgctgctggggctgttctttattggcgtcggcatgtcgattgatttcggcacgctggtggagaatccgctgcgcattctgctgttgttggccggttttctggcaatcaaaatcgtcatgctgtggctggtcgcgaggccgctgggcgtaccggcaaaacagcgtcgctggtttgccgtcttattaggccagggaagtgagtttgcgtttgtggtttttggcgcggcgcaaatggcggatgtacttgagccggaatgggcaaaagcgctgacgctggcggtcgcgctgtcgatggcggctacgccgatttttctggtgctgctgacgcgcatggagaagaccgcgacgggtgaagcgcgcgaggcggatgaaatcgacgaagagcaaccgcgggttattgtggccgggtttggacgatttggtcagatagccgggcgtttgctgctgtcgagcggggtgaagatggtggtgctcgatcacgaccccgatcatatcgaaacgctgcgtaaattcggcatgaaggttttttatggcgacgcgacgcgtatggatttactggaatctgccggagcggcgaaggcggaggtattgattaacgccattgacgatccgcaaaccaatttgcaactgagtgaactggtgaagtcgcatttcccgcatctgcagattatcgcccgcgcccgtgatgtcgatcattacattcgcctgcgccaggctggtgtggcgatgcccgaacgtgaaaccttcgaaggcgcgctcaaaagcgggcgacaggcgctggaggcgctggggctggggcgttatgaagcccgcgagcgcgcggatctgttccgtcattttaatacccggatggtggaagagatggcgaaaggggaaaacgatccgttatctcgcgccgccgcctataaacgtaccagcgcgatgttgagcgaaattattaccgaggaccgggagcatctgtcgttgattcagcgccacggctggcagggaacggctgagggcaaacattccggggaggtcgccgatgaacccgaggtcaaaccgtcaatctaaagtaaaaaatgtgatgttctgcaaactttactgctaattggctgtttttgaactactgtaatgctggcgctccacatcaaatgagtggcgtcgccagcagaacgaaaaattttcgtgctcatcctcttttcgtcagtcgacgaaagattgcgctttacgtatagtggcggcaattttttttgtatcaggaaataattaatgatcagtctgattgcggcgttagcggtggatcgcgtcatcggtatggaaaacgccatgccgtggaacctgcctgccgatctcgcctggtttaaacgtaacacgttaaataaacctgtcgtcatgggacgtcacacctgggagtccatcggacgccccttaccgggacgtaaaaatattgttatcagcagccagccaggcaccgacgatcgcgtgcagtgggtgaagtctgtcgatgaggcgattgccgcttgcggcgatgcgccggaaattatggtcattggcggcgggcgcgtgtacgagcagttcctgccaaaggcgcagaagctttatctgacgcatattgatgcggaagtcgaaggcgatacccattttccggattatgaaccggatgactgggaatcggtattcagtgagtttcacgatgccgacgcgcagaattctcacagctattgtttcgagattctggagcgtcgttaacgctgtagtgccggatggcggcgaaacgccttatccggcctactcttgagccagatgtcgccagatgtaggcctgataagcgtagcgccatcaggcataaacctatcaggcgttgaccgcttcgccttcgcccatatccatctggcggtttgacggctgcacaaaatactgtttatcttcccagcgtaaacaggtcaactccccgccccagcagcagccggtatccagcgcgtaaataccttccggcgtccctttcccttccagcgacgcccagtgcccgaacgcaatactgtaagcctcgctcaccggccccggaatggcgaaccacggcttcagcggcgcaggggcattttccggcgacgctttgctgtacatatccagttgaccgttaggaaagcagtaacgcatacgggtaaaggcattagtaataaagcgtagccgcgccagaccgcttaactccggcgaccagttattcggcatatcgccatacatcgcgtcgaggaaaaacgggtacgagtcactcgacagcaccgcttcaacatcgcgggcgcactcttttgccgtctgcaaatcccactgcggggtaatacccgcatgcgccatgaccagctttttctcttcatctacctgcaacagcggctgacggcgtaaccaattcaacagctcatcggcgtccggcgcttcaagaagcggggtcagccggtctttaggtttgttgcggctaatcccggcgaatacggccaacaggtgtaaatcgtgattccccagcaccaaacgcacgctattgccaagcgatttgacgtagcgtaacacgtccagcgaaccgggaccgcgggcgaccaaatcgccagtcagccacagagtgtctgtgtctggcgtaaattccacttgctgtaataaggcgatcagttcgtcgtagcaaccgtgaacgtcgccgatgagataagttgccattgttataattttagtgaatgagtgtagggacggcgagtcgaaacacggggatgtcgatggtaaaggcgtcgccattttcatcgatcatttcgtaatgaccctgcatggtgcccagcggcgtttcaattaccgcgccgctggtgtactggtactcttcgccaggcgcaatgcgcggctggacgccaaccacaccttcgccctggacttcggtttcacggccatgaccattggtaatcagccagtagcggcccaatagctgcactggcgcccggcccagattgcggatggttacggtataggcaaaaacgtaacgttcatcgtcaggtgaggattgcgcctcaatgtagacgctttgcacctgaatacacactctgggcgaattgatcatgtttaactctccttcaaaggcgcgttttccgacagatagttggccatctggcagtactgcgcgacagagatattttccgcgcgcattgccgggtcaatacccatttccgtcaacgtctcaacgctaaaaagattgccgagactgttacggatcgttttacggcgctggttaaaggcctcggtggtaatacggctcaacacgcgaatatctttaaccgggtaaggcattgttgcgtgtggaaccagacgcaccacggcggagtccactttgggcggcggcgtgaaggcggatggcggcacttcaagcaccgggatcacctgacagtaatattgcgccatcacgcttaaacgaccatacgctttgctgttcggccctgcaaccagacgatttaccacttctttttgcaacataaagtgcatgtcggcaatggcatcagtatagctaaagagatggaacatcagcggggtggagatattatagggcagattgccgaacacacgcagcggttggcccaactgcgcagacagttcgccaaagttcatggtcatggcgtcctgctgataaatagtcagcttcggccctaaaaacggatgggtttgcaaacgcgccgccagatcgcggtcaagttcaatgaccgtgagcttatccagtcgttcgccgaccggctccgtcagcgccgccagaccggggccgatttcaaccatcgcctggcctttttgcggattaatagcagaaacaatactgtcgatcacaaaccgatcgttgagaaagttttgcccgaagcgtttacgggctaaatggccctgatggactcgattattcattgggtattaacaatcattttgatggcgagattaagcgccgtaataaaactgccgacatccgcttttccacggcccgccagttcaagcgcggtgccgtggtcaacggaggttcgaataaaaggtaggccgagcgtaatattcactccccgaccgaatccctggtattttagcacgggcaggccctgatcgtggtacattgccagcaccgcgtcggcattatcgagatatttgggctgaaacagcgtatcagcaggtagcggcccgttgagtttcatcccctgcgcccgcagctcgtcgagcaccggaatgatggtgtctatctcttccgtgcccatatgaccgccttcgcccgcgtgcggattcaggccacagacaagaatgcgcggttcggcaataccaaatttggtccgcaaatcgtgatgcaaaatagcaatcacttcgtgcaaaagcgcaggggtgatggcgtctgcaatcgcccgtagcggcagatgcgtggtcgccagcgccacgcgaagttcttcggttgccagcatcatcacgacttttttcgcctgcgaacgctcttcgaaaaactcggtatgaccggtaaacgaaatgcctgcgtcgttaataacgcctttgtgcacggggcctgtgatcagcgcggcaaattcaccgttcagacagccatcacacgctcgcgccagcgtctctaccacgtaggggccattttctaccgtcaactgaccggagatggcaggcgcgcgcagcgagaccggcaatagggtcagcgttcccgcgggctgcggcgcagcggggacatcaggcgagtaagggagaagcgagagaggcaggccgagcatggcggcccgctccgtcaggagcgcgccgtccgcacagacgaccagttcaatcggccacgcgcgttgcgccagttggacgacaagatcggggccaatcccggcgggttcgccgggagtgataacaacgcgttgcgcactgctcattagttactcaaaatcttaacgtaagcgctggcgcgctgttcttgcatccaggtcgccgcttcttctgagaatttacggttcatcagcatacgataagcgcgatctttctgcgccgcatcggttttgtctaccttacgcgtatccagcaattcgatcagatgccagccgaaagaggagtgtaccggcgcgcttatttggcctttatgcagcttcgttagcgcgtcgcggaacgccgggtcgaaaatatctggcgtagcccaacccaaatcaccgccctggttagcggagcccgggtcctgagagtactctttcgccgcagcggcaaaggtggttttaccactcttaatgtcagccgcgatttcttccagcttcaggcgcgcctgctgatcgttcatgatcggcgacggcttaagcagaatgtgacgagcgtgaacttcggtcacggagatactctggctctgaccgcgcaggtcatttactttcagaatgtggaagccgacgccggagcgaatcgggccgacaatgtcgcctttcttcgcggtgctcagcgcctgggcgaaaatccccggcagctcctggatacggccccagcccatctgaccgccttttagcgcctgctggtcggcagagtaggtaatcgccagtttgccgaaatctgcgccgttacgcgcttcttcaacaatgctttccgcctggcgctgcgcgtcgttaacctgctcggaggttgggttttccggcagagcaatcaggatatggctcaggttcagctcggtgctggcatcgttttgggtgccaatctgttttgccagcgcgtcaacttcttgcggcaaaacggtgatacggcgacgaacctcattgttgcgcacttcagagataatcatctctttacgaatctggttacggtaggttgaatagttcagcccatcgtaagccagacggctgcgcatctgatccatcgtcatattgttttgtttggcgatgttggcgatggcctgatccaactgctcatccgtgatcttcacccccatcttctgacccatctgcaggataatttgatccataatcaaacgttccaggatctggtgacgcagcgtggcgtcgtccggaagctgctgacctgcctgacccgcgttgagtttgactgattgcattaagccatcaacgtcgctttccagcacgacgccattattgacgacggctgcgactttatcgactacctggggggcagcgaaactggtattcgcgatcatggcgataccgagaagcagcgttttccagttcttcatactttttccatttcaattaaccgcaatgcggattacgttgtaaatcaatcagattacatagagctttggtacggcagaatgttcgaacgcaacatttcttgcgtgccgaggccgtagttagagctcaaaccgcgcagctcaatgttgaagccaatcgcgttatcataaatcgcgtgttgtttatcgttatcccaaccgttcagcttacgttcgtatccgacgcggatcgcatagcagcaagagttgtactgcaagccgagcatctggtctgcaggtttgctcgaattggtatcgaagtagtacgcgccgacaatcgaccagcgatcggcaatcggccaacttgccaccgcgcccacctgattgatgccgtttttatactgctctgccgtggaataatacgaaggcaacgtagcctgaatatattccgggctggcatagcggtagttcaactgtaccagacgatcctgatcccgacggtattcgaggctgctgctgctggtagcgacgctatccagacgggtatcgtactgcactccgctacgcagcccccagcgttctgaaatacgccagtaagtgtcgcctgcccaaaccagcgaaccggttttgtcgtcattctcccatttaatgttgtcatcgccggtgcgagactccgtgaaatagtagatttgaccaacagaaacgttaaaacgttcaacggcggcatcatcataaatgcgtgttgtgacgccggttgtgacctggttggcggaagcaatacggtcgagaccgccataagtgcggtcgcggaacaggccgttatagtcggattgcagcaaagaagaatcgtagttatagatgccgctctggtcgcggtacggcacatacaggtactgcacgcgtggttccagcgtctgggtataccccggcgccagcatcgccatatcgcgttcgaagatgagcttaccgtcgactttaaactgcggcatgacgcggttaaccgaatcttccagcttatttttattgtttggatcgctgttatagctgtccagattcgtttgctgatagtgcgtcgccatcagcttcgcttcggtgttcaggctgccccagcggttggagagcggcaaattgatggttggctccaggtggacgcgggtcgcttccggcatattgtctttggtgttaacaaagtgcaccgcctggccgtaaatccgggtatcaaacgggccgagatcgttatggtagtagttaacgtctaactgcggctccgctgaatagctgctggtgttttgatcgttaaagacctggaattgtttggtcgacaccgtagcgtcaaagttttgtacggcgtagccgacgctgaatttctgcgttgcgtagccgtcggtactggaaccgtacttactgtcgaaatcgttaaagtagctggagtcgctgactttggtgtaatcgacgttaaaacgccacacctgatccatcacgcctgagtgctgccagttgaataaccagcggtgcttatcgccctctttggggtgatcgtcctcgtagactttatcagaaggcagataatctaattccatcactccctcgcctgcctgcgtgagataacggaattcgttctcccacataatattgccgcggcggtgcatatagtgcggggtgatggtggcgtccatattgggcgcgatgttccagtaatacggtaagtagaactcgaaatagttcttggtcgtgtatttcgcgttcgggatcaggaaacctgagcgacgcttgtcaccgacgggtagctgtaaataggggctataaaagatcggaaccggacctactttaaaccgggcgttccagatctccgcaacctgttcttcgcggtcatggatgacttcactccccaccacgctccaggtatcggagccaggcagacaggaggtaaagctgccgttttccagaatggtatagcggttttcgccgcgctgcttcatgagatcggctttaccgcgcccctgacggcccaccatctggtaatcgccttcccagacgttcgtgtctttggtgttcaggttcgcccagcccttcggccctttaaggatgacctgattgtcatcataatgcacattacccagcgcatcgacggtgcgtacaggttccggctgaccttccgcctgcttctgatgaagctgcacttcatccgcttgcaggcggctattcccctgcataatgtccacgttgccggtaaaaacggcatcgtccgggtagttacctttagcgttatcggcattgatagtaaccggcagatcgttggtatcgccttttaccagaggacgatcgtagctcggcacgcccaacatacactgtgaggcgagatcggctgccagcccctgatgactataaagggcgctggcgatcatggtggccagaagagtgggaatacgttttttcatacgttgtatttattgttccatcatcggtagcgttgcgcgtgacaaacggtcacagcctaacttactcatcttcgctgcgccagtgttaatcctgccgtttagcgtctgtggtgttaggcacggcattgaatgacaggtatgataatgcaaattataggcgatgtcccacaattgaccgtagccttcatttgcagaaaagcaccttattttgtgggagatagcctcaccgatagcgtaacgttttggggagtctatgcagtactggggaaagataattggcgtcgccgtagccctgatgatgggcggcggcttttggggcgtggtcctgggtctgctggtgggccatatgttcgacaaagcccgcagccgaaaaatggcgtggtttgccaaccagcgggaacggcaggcgctgttttttgccaccacctttgaggtgatgggccacttaaccaaatcaaaaggacgggtgacggaagcggatattcatatcgccagtcagttgatggatcgtatgaatttacacggcgattcacgtactgccgcgcagaacgcctttcgggtcggaaaagcggataattacccattacgtgaaaagatgcggcagtttcgtagcgtctgcttcgggcgttttgatctgatccggatgtttctggaaattcagatccaggcggcgtttgccgatggctcgctacaccctaatgagcgggaagtgctgtatgtgattgcggaagagttaggtatttcccgcgtacagttcgatcagtttctgcgcatgatgcagggcggcgcgcagtttggcggcggttatcatcaacagtccggcggcggctggcagcaggcgcagcgcggcccgacgctggaagatgcctgtaatgtgctgggggttaaaaccaccgacgatgcaaccaccattaaacgcgcttatcgcaaactgatgagcgagcatcatcctgataagctggtggccaaagggttgccgccggaaatgatggagatggcgaagcaaaaagcgcaggaaattcagaaagcgtatgagctaatcaaagaacagaaaggcttcaagtgattgaattgccggatgcggctagcgccttatccggcctacgttaatgaatgtaggccgggcaagcgaagcgccccggcataaattggctcagaatttaaaaatctgccgggactttaaacgtcatgctgttaccgtaagcgggatgggtaatggtcagcatttcggcgtgtaactgcaaacgcggcgccagcgacaacgcttccggcgaggcgtaaaaccgatcgcctaaaatcgggtggcctaacgccagcatatgcacacgaagctgatgcgaacgtccggtgatcggcttgagcaccacgcgggcggtattatccgccgcaaactccaccacgttatattccgtttgcgccggtttgccggtttcataacacactttctgctttggccggttcggccagtcgcagatgagcggtaagtcaaccagcccttccgccggggagggatgaccccatacgcgcgctacatactgctttttcggctcacgttcgcggaactggcgttttagctcccgctccgcggctttggtcagcgccactacaatcacgccgctggtggccatatccagacgatgcaccgattctgcctgcgggtagtcgcgctggatacgcgtcataatgctgtctttgtgcgcttccagacgccccggcacggacaacaggccgctgggcttattgaccaccataatgtgctcatcctgatacaggataaccagccagggttcctgcggcggattgtagttttccatccccatgtacggctccgttattggtgcgtgacgacgataagacgcagcgcgtccagacgccagcctgcctgattcaggctttccagcacctgctgacggttgctgtcgatagcggcaagttcgtcgtcgcgaatgttcgggttgacggcgcgcagcgcttccagacgcgacagttccccggacagtttttcatccgcctcgcggcgcgcgttatcaatcagcgctctggcggacttttcaatctgcgtctcgcccagttgcaaaatggcgtggacgtcctgttgaacggcgttcaccagtttgctaccggtgtggcgattcacggcgctgagctggcggttgaaggtttcaaactcgacctgggcggccagattgttgccgtttttatctaacagcatacgtaccggcgtcggcggcaggaagcggttcagttgtagctgtttcggcgcctgcgcttccacgacgtaaaccagttcgaccagcagcgtgccgacgggcagcgctttatttttcaacagcgaaatggtgctgctgccggtgtcgccggagaggatcagatccagtccgttacggatgagcggatgttcccaggtaataaactgcgcatcttcgcgagacagggctacgtcacgttcaaacgtgatagtacagccgtcttccggcaggccggggaaatccggcaccaacatgtggtcggacggcgtcagcacgatcaggttgtcgccgcgatcgtcctggttaatgccgacgatatcgaacaggttcatggcgaacgcaatcaggttggtgtcgtcgtcctgttcttcaatgctttgtgcaagctgttgggctttttcaccaccgttggagtggatctccagcaggcggtcgcggccctgttctaactgggcttttagcgcttcatgttgctcgcggcaggatttgatcagatcgtcaaacccgtcggtttcttcaggcgcggccagatagttaatcagactggcgtaggctgaatcataaatcgcgcggccggttggacaggtgtgctcaaaggcgtccagcccttcgtgataccagcgaaccagcaccgactgggcggttttttccaggtacgggacgtggatctggatatcatgcgcctggccgatgcgatccagacgaccaatacgctgttccagcagatccgggttaaacggcaagtcgaacatcaccagattgctggcaaactggaagttacgtccttcggagccgatttcggaacataacagcacctgcgcgccggtatcttcttcggcgaaccaggcggcggcgcggtcgcgttcgataatcgacatgccctcatggaacacggcggcgcggatgccttcgcgttcgcgcagcacctgctccagctgtaacgcggtggtcgctttggcgcagatcaccagcactttttgcgaacgatggctggtcagatagcccattagccactcaacgcgtgggtcgaagttccaccaggtgccggtatcgccttcgaactcctgataaatttgttccggatagagcatatcgcgggcgcgatcttccgggcttttacgcgcgcccataatgccggagaccttaatggcggtctgatactgggtcggcagcggcagttttaccgtatgcagttcacgtttcgggaaccccttgacgccgttacgggtgttgcggaacagaacgcggctggtgccgtggcgatccatcagcatcgacaccagctcatcacgggcggcctgcgcatcgtcgcgatcgctattagcggcctgcaacagcggttcaatatcctgttcgccgatcagatcgcccagcctgttcagttcgtcgttgctgagtttattgcccgccagcagcatggccaccgcatcggcgacaggtcggtagtttttctgttcttcgacaaactgttcgaaatcgtggaaacggttcggatccagcaggcgcagacgggcgaaatggctttccatccccagctgttctggcgtggcggtcagcagcagcacgcccggtacgcgttcagctaactgttcgatggccatatattcacggctcggcgcatcggtactccacaccagatgatgcgcttcgtcgaccaccagcagatcccactcggcgtcgcacaaatgttccagacgctgcttattacggcgggcgaaatccagcgagcagatcaccagttgttcggtttcaaacgggttatacgcgtcgtgctgcgcttcggtatagcgttcgtcatcgaacagcgcgaagcgcaggttgaaacggcgcagcatttctaccagccactggtgttgcagggtttccggaacgatgatcaatacgcgttccgccgcgccggataataactgttgatgcagaatcatcccggcttcaatggttttacctaagcccacttcatccgccagcagtacgcgcggcgcgtggcgacgacctacatcatgagcgatattaagctgatgcgggatcagattggtccgctgaccgcgcagaccgctgtatggcatccggtactgctcgctctgaaatttacgggcgcgatagcgcagcgcgaaccgatccattcgatcgatttgaccggcgaacagacgatcctggggcttactgaaaaccaacttgctgtcgagcagaacttcgcgcaacgtcacattggtctcttcggtatccaggcgggtgccgacataaacaagcaggccattttcttcttttacttcatcgatatgtagctgccagccttcatggcttgtaatcgtatcgccagggttgaacatgacgcgggtcacgggagaatcactgcgcgcatacaggcggttttcccccgtggacgggaaaagtaaggtgacggttcgcgcatccatcgcaacaacggttccaagtcccagctcgctttctgtatcgctgatccagcgttgaccaagtgtaaaaggcatatgtgttcggctctatatctttaattgcaggcattactcgccattcccaggcgacagcactggataattgcgagtatacgaccccgctaccaggctaatgtggtagtggcgttaattaggtccaggaatggaaagggcgctatggtactggaaggcggcgctttcgtcacgcgtcaaaataaccccagttgcccggtcagtagtgtagcaaaattatcttcaacgaagggaagaattccttccgccacgggttgtagctggcgggtaagatagtgttcgtaatccagcggcgactgctggtaatccacgggctcggggccgttaacagtccagacatattttatggcgccgcgattctgatactgcgccggacgaccctgcttcaggttttgttcatccgccagccgggcggcgcgaacgtgcggcggaacgttacgttggtactcatgtaaagggcgacgcagacgcttacgataaaccagctgtgcgtccagttcgcccgccatcagtttatcgatagtctcgcgcacatagtcttgataaggttcattgcgaaaaacacgcagatacagctcctgttgaaagcgctgcgccagcggcgtccagtcggtccgcaccgtttccagacctttaaataccatgcgctggctgtcgccttcctgaatcaggcccgcgtagcgttttttactgccagtatccgcgccgcggatggtcggcatcagaaaacggcaaaagtgggtttcaaactccagctccagcgcgctggtcaaattttgctgttgtaacgtctgcgcccaccattcgttcacgtgacgcaccagcctgtgcccgatttccgccgcatcggcttctgaatgcgcgcgccggagccagacgaaagtggaatcggtatcgccataaatcacgtcataaccctgcgcctcaatcagcgctttggtctggcgcataatcgcatgaccgcgcatggtgattgacgacgccagacggggatcgaaaaagcgacaggccgtggtgccgagtacgccataaaaggcgttcataatgattttaagcgcctgcgagagcggtttattaccctgacgtttggcttcatcgcgcccgtgccagatttggctaacaatttccggcaggcagtgcttttctcgtgaaaaccaggcgtcaaggaaaccttcggtactgtgttccggatccggctgcgccatgccttcgaccagcccgacgggatcaatcaaaaacgtgcggataatcgacgggtacaggcttttataatccagcaccagtactgaatcgtataatccgggttgtgaatccattacgtagccgccgggacttgccagcggcggcacttcgccgagattgggcgcgacatagccggcgcggtgcattcgcggaaagtaaagatgcccgaatgcggcgaccgaaccgccgtggcgatcgaccggcaggccgttgatcgtcgcgcgttccagcaaaaacggcatgatctcggttttatggaaaatgcgcgtgaccagctcgcagtctttcaggttgtaggtggcgagggcgggtttatcctgggcaaagcggcgatcgatctcatccatacgatcccaggggttatcaatggattttccttcgccgagcagttcctgcgagacggcttccagcgaaaaagacgaaaaattccagaacgcggatttaagcgcgtcgataccatcgataatgactcgccctctggcctgggcgaaaaaaacgccgtttttgaagccatgttcgcgccactccagttcgctattgtctcgccccagccgtaaagggatacggtagcgttcggcatgtttttgcagcatacgcaggtcgaactgcactacgttccagccgatgatgacatcaggatcatgttcggcaaaccaggcgttgagtttttccagcagctgcgggcggctggcgacatacacaagctcgaagtccagttggtggtcatcgccattcgccgggcccagcatataaacggtacgctggccgcagccttccagaccaatgcaatacagttcgccgtgtcgcgtggtttcgatatccagcgagacccattttagcggcggtcgatagtcggagtggggtttaagacgcgcattgcggataacgccgttgcgcatctcgccgtctacccaaacgggcgacgtaataaaacgctccatcaggtaacgttccggcgggcgtacatccgcttcataaacggtgacgccgttttcgcgcagcagtttctccatccgcataagctggcggtgagtgcggcaatacagaccggataccggctgacgatgaaagtctcgcagctggagcggcgtcaggcgatagtctttttccgcctgtagcagcgaggcggcgcgggaggtctggctggtcggaataaacgccacggactcttgcggcgccagcgttgcctgcacagggccgttgtctgtcgccagccagaaagagacctccgtcccttgcggcgtatcccgccagtgccgggttaaaatgaaacctgcctgcgccacgatgattacctgtctaaaaaattcacgctaattataacctgttttagggggtaatactgttattttgtacaggcatataacgtaaaagccgatatccgctgtaataaaaagtttctcgcagtaagaagcgggtttgcgcccaccaggatttatagcgggtggatcgcgtgggtgatgagcggctatcgataccattatcctgagcgatagttttcagacgcagcatatgcagcggatcgctgaccagtaacgctgtgcgccattgttgttgtcgcagtatctgttttgcgtaacgaatattttcgcgcgtcacggtagagcgctcttcaataaaaattgccttagccggaatccctttttccagaacgtattgacgggctatcgccgcgtcggaaaccgttgcgccagcgccgtagccgccggttaataccaacgcgcggacaatgtgttgttggtaaagccagatggcatgatccagtctggcctgaaaaacgggagaaggcgtttttccgctaacgcctgctcctgcgacaatcgcgcagtcagctacgcgcgtctggttttgctgactgaactgataaatagcgatggcattatggataaacaccgtagccataatgagaattatgcctgccgcgattctgatgatgtagcgatatttcatgaatgagttcgttccccgtgacgggtgtaatggatattttaacgataaaatggcttttagcgtcagatatttttgctgacgtatatttatcaatatatacccaaaataattcgagttgcttaaaggcggcaagggagtgagtccccaggagcatagataactatgtgactggggtgagcgacaaatctgccgggagcagatttgaacgtcgcgtgcgacggcccgtcagggcaaggcccatggatgggccgagtaatccgtagccaacacataagcaactcgaagtatgaagggtataatgatgctggtgtagacagcagatataattatcctataactgctaattttgaatcatttttatttacagtttttacccatgtattagccgttttgtgtcaagtctgttttcatacattaagtatttttcagaaaggcgcttgttcgaatctgttacttatttctcggattaacaaaaaagcgatattttttgtttgttttaattaatgaaaagtgtaacaatttcatttggaacatccgcaccgtcaggtagaaatataatattccaattggccgctatggttaaataaaaatggattacagtgcgaattcgtcgggaactctctgcataatttaatttttattttagaatataattttattttgactttcgggtgcgggtgtttttatcaaaatttgtggtattcgggaatgatcttttatgaatgtgagtatgcaggcgcgtctggtagggaacgaccgttatcttttcgtcaatactcaacgcgctaacccttccataaaaaccgtgagtcgattttttgagtataaaacatggacagaacagatttggcgtaccgagattattgaaaacggcaatgctttttttcactggcaaggacacgacagaaaaaacggacatcgggataccattattaactatctgttaaatgggcaacgctggcagtcaacaatcgaagattatattttcttccatgcgctggaaggaaaagcgtggcagggacattatgacaatattattgaatatgtgagttctgatcattacgtctatcaaagcgcatttgctgaatatatcaccgaccagattcatcaacgcgccccccatgggacgcgtttttagaggcattactgcccgtaataggcttttgcgccgtgtttgcgtagatagtgtttatccagcagggattgctgcatgtcgggcaactgcggcgcaagctggcggcagaagatccccatataggccacttcttccagcacgatggcgttatgcactgcatcctcggcatttttaccccaggcaaacgggccgtgcgaatggacaagcacgccgggcatttgagcggcgtcaatgccttgtttttcaaaggtttcaacaatgacattgcccgtttcccattcatactcgccattaatttccgcctcggtcattttgcgagtgcagggaatcgtaccgtagaaatagtcggcatgggtggttcccgtcgccggaattggctgacccgcctgcgcccagatagtcgcgtggcgcgaatgggtgtgtacgatgccgccgatagtcggaaatgcctggtacaacagacggtgggttggcgtatcggacgacggtttcttatgaccttcaacgacttcaccgctctccaggctgaccaccaccatatcgtcagcggtcatgacgctataatcgacgccggacggcttaatcaccagtacgccgcgttcgcgatcgacggcgctaacgttaccccaggtaagggtgaccaggttgtgttttggcagcgccagattagcttccagtacctggcgtttgagatcttctaacattgttttctccctgccggatggcgcttcgcttatccggcctacgagcgacggtgtgccggatggcgacataaatgccttattcggcctacaggaccgtaggcccggtaaacgcagtgccaccgggcaatccgtttcaccaattaacgtttgaacccgtaatacacctcgttccagcgcagcgcgtccttaaaggccggcagatgggtatcgttatcaatcaccgcgatttcgatatcgtgtatttctgcaaactggcgcatatcgttcagatccagcgcgtggctgaagacggtatggtgcgcgccgccagccagaatccacgcttcggaggcggtcggcagatccggctgcgccttccacagcgcgttagccaccggcagtttcggcagggagtgcggcgtttttacggtgtcaatgcagttgaccagcaggcgataacgatcgccgaggtcgatcaggctggcgacgatcgccgggccggtttgggtattgaaaatcaaacgcgccggatcttccttgccgccaatgccgaggtgctggacgtcgaggatcggtttctcttccaccgcgatggacggacacacttccagcatgtgcgagccgagcaccagatcgttgcctttctcgaagtggtaggtgtaatcctccataaatgaggtgccgccctgcagaccggttgacatcactttcataatgcgaagcagagcggcggttttccagtcgccttcgcccgcaaagccgtagccttgctgcatcagacgctgtacggccagacccggaagctgtttcagaccgtgtaaatcttcaaaggtagtagtgaatgcgtggaagccgccctgttccaggaaacgcttcataccgagttcaatacgcgccgcctcccgcacgttctggcgtttatcgccgtggatttgggtggcgggcgtcagggtatagctgctttcatactcgtcaatcagagcgttgatatcgccgtcgccgatagaattcaccacctgcaccagatcgccgaccgcccaggtattgaccgaaaagccaaatttgatttgcgcggccactttatcaccgtcagtcactgcgacttcacgcatattgtcgccgaagcggcagacttttagctggcgggtatcctgtttagagaccgcctggcgcatccaggcaccgatacgcgtatgggcctctttatcctgccagtgaccggtgacgaccgcgtgctgctggcgcatccgcgcgccgataaaaccgaactcacgaccgccgtgcgcagtctggttcaggttcataaagtccatatcaatgctgtcccacggcagggcggcgttaaattgggtatggaattgcagtagtggtttgttaaggatactcagcccgttgatccacattttggccggggagaaggtgtgcagccagaccaccagccctgcgcagcgatcgtcataattggcgtcacgacaaatggcggtaatctcatccggcgaggtgcccagcggttttaataccagtttacatggcagtttggcttcggtattcagcgcgttgaccacatgctcggcatgttgggtgacctgacgcagggtttctgcgccatacaaatgctggctgccaatcacaaaccatacttcataattatcaaaaatcgtcattgtcgtgtccttaatgagtcaggattgcctgattggccggggtcgttggcgccggcgcggcagtcggaagataatgttgttctgcgcttagcgcccactgctggtagcggcggtaaagctgttcgaagcgttgcgcctgttcagggtgggggcgcagagtgcgttctaccgcgctcgccatgctttgctgggcggctggaatgtcggcatggactttcgcagcgacggcggcaaagatagcggcgcctaatgcgcaacactggtcggaagcgacgatctgcaacggacgattcagtacgtcgcagcagacctgcataatgacctgatttttacgggcgatgccgccaagcgccatcacgttattgaccgcgataccctgatcggtaaaacactcctgaatggcgcgcgcgccgaaggcggtcgaagcgaccagaccgccaaacagcgctggcgcgtcggtggcgagattgagatcggtaatgacgcctttcagacgctgattagcgtttggcgtgcggcgaccgttaaaccagtcgagcaccaccggcaggtgatccagggacggatttttcgcccaggcgtcggtgagcgctggcagtagctgcttctggctggcgttaatctggggtttcagttccgggtgctgcgcggcaagttgctccagcggccagctcaacacgcggctaaaccaggcgtagatatcgccgaaagcagattgccccgcttccagaccgataaagttcggcaccacgctgccgtcaacctgaccgcaaatgcctttcacggcgcgatccccgacgctctgtttatccgcaatcagaatgtcgcaggtagacgtgccgatgactttcaccagcgtattgggctgtgcgcccgcgccgaccgcgcccatgtgacagtcgaacgcgccgccggaaatcactacgctttccggcaagtcgaggcgctgcgcccattcggcgcacagggtgcccacgggcagatcggcggtgaaggtttcgctaaataacgggtagcgcagatgacggttaatgcacggatcgagttcatcaaagaagctcgcgggcggcagaccgccccagctttcatgccacagcgttttgtgcccggcgctgcagcggccacggcggatatcctgcgggcgagtggtgccggaaagcagcgccggcacccagtcgcacagctcaatccacgagacggcggcctgcgcgacggcgctatcctgccgggtgacgtgcagaatcttcgcccagaaccattcgctggagtaaatgccgccaatatagcgggagtagtcgaccttgcctggcttatggcacagacgagtgatttcgtcggcctcttccacggcggtgtgatctttccacagcacaaacatcgcattcgggttctcggcgaactctggacgcagcgccaggacgttaccgtcggcgtcaatcggcgctggcgtagagccggtgctgtcaacgccaatgccaacgacatttgcgcgttgcgcggcgcttaattgtgccagaacggctttcagcgcggcctccattgactccatgtagtcgcgcggatgatgacggaactggttgttcgggccgtcgcaataacggccttcttgccagcgcggataccactctacgctggtggcgatctcgtcgccggtggcgcagtccactgccagagcgcgcactgaatcactgccaaaatcgaggccaattgcaattgccatcgtcttactccatccagaaaaacaggtatggagaaacagtagagagtcgcggcaaaaaccgtcaggcaggatccgctaatcttatggacaaaaatgctaatgctttgcaaagtgtgacgctgtgcaaatattcaatgtggacattccagccatagttatagacacttctgttacttaattttatcgcctgaactgtacgcttttgttacaaagcgcttttcacaagcggggttgatacgtgctttcatcaagcgcaaagtcttgcggagacggaagctctgtcgtcctggtcgatatggacaatttgtttcttctctgaacatcggggggtagagaaatcatggctgaaacgcaaaatgatccgctattgccgggatattcatttaatgcccatctggtcgccgggctgacgccaattgaagcgaatggatatctggatttttttatcgatcgtccgttgggcatgaagggatatattcttaacctgaccatccgcggagagggcgtcattaataataatggcgagcagtttgtctgtcggcctggcgatatattattgtttccgccgggcgagattcatcactatggacggcatccggacgccagcgagtggtatcaccagtgggtttatttccggcctcgcgcctactggcaggagtggctgacctggccgacaatctttgcccagacaggatttttccgcccggacgaggcgcgccagccgcatttcagcgaactgttcgggcagatcatcagcgccgggcaaggggaaggtcgctattctgagctactggcgatcaatctgctggagcagttgttgctcagacgtatggcggtaattaatgagtcgttgcacccgccgatggatagccgtgtgcgcgatgcctgccagtatatcagcgaccatctggcggacagccattttgatatcgccagcgtcgcccagcatgtctgcctgtcgccctcccggttatcacatctgttccgccagcagttaggcattagcgtattgagctggcgcgaagatcagcgtatcagccaggcgaaacttctgcttagcactacgcgaatgccgatagcgaccgttgggcgcaatgttggatttgacgatcagctctatttttcgcgggtatttaaaaaatgcaccggggcaagtcctagcgagttcagggccggatgtgaataaaaagtgaatgatgtgtccacaaagatgtcataagccgtaactattcggataattgacggcttgacgaagggggacggggtaagcagaatccctgcttcatcacgctgacggacacactatgcaagcactgctggaacactttatcacccaatccactctgtattcgctcatcgccgtgttgctggtcgccttcctggaatcgctggcgctggtggggttgattttacccggcacggtactgatggcggggctgggcgcgcttatcggcagcggcgagctcaatttttggcatgcctggctggtgggtattatcggctgtctgatgggcgactggatttcgttctggctggggtggcgctttaaaaagccgctacaccgctggtcttttatgaaaaagaacaagtcgctgctggataaaaccgaacacgcgctgcatcagcacagtatgttcacgatcctggtcggacgttttgtcggtccgacgaggccgctggtgccgatggtggcagggatgctggatcttcccgtggcgaaatttattgggccgaacttgattggctgtttgctgtggccgccgttttatttcctgccgggcattctggcgggagcggcaatcgatattccttccgatatgcagagcggagatttcaaatggctgctgctggcgacggcgttgctgctgtgggtcggaggctggctatgctggcggctgtggcgcagcggcaaagcggcagtcgatcgtttaaccgcgtatttcccccgcagccgtttgctgtatctggcgccgttgacgctcgggatcggcgtggtcgcgctggtggtgctggttcgccacccgctgatgccggtatatatcgatattctgcgcaaagttgtggattactaacgattcctttgccggatggcagcttcgccttatccggcctacaaaatatgggatttgatgcccaatagcgctgaggcgctggcttgaccgcttagtagctcgtctgttttgccttgccacgcgatacgcccgtcggccacgacgattgaccggggcgcaattcgcgccgcatcttccacgctgtgcgagaccatcaacagcgtgagctgtcgctcgcggcagatatcgctgaccaacgtcagcatctcctggcgcagcgcgggatcgagcgcggagaacggttcatccagcagcagtaccggctgttcgcgtaccaggcagcgcgccagcgctacccgctgacgctggccgccggacagttcgcccggtaaacgcgtcatcagactctcaatgcccatctgatgtgcgatagcgtcccgtttttcccgctggctggcgttgagcgttaacccagggtttagccccagaccgatattttgctgcacattcaggtggctgaataaattattctcctgaaacagcattgagaccggacggcgtgagggcggcgtaagcgtatgatcgtcgccggcaatcagtagcgtaccgctggcaggcgcaagaaaaccggcaattaaattcaacaacgtgcttttccccgcgccgctggggccaagaatcgccacctgctcgccgcgttctaccgccagcgtaaaacgcatcggcaaatgatggtaaagccaggtgatatcaatcagttttagcatgtcggcccggtagtttctctatgagggtaaataacgtaaagcagagcagcagcagtatcagcgcggtcactgcgccgtcctggctgcggtaggagccgatctgctgatacagataaaacggcagcgtgcggaaattgtcattgccgaaaagcgcgacgacgccaaaatcaccgatagaaagtacgcaggcaaacgccagcgcctgcgccagcggacgtttcagcgcccgcagttccacgatctttaaccgcgaccagccttcaattcctaatgactggcacagcattccataacgggcggtaatatcgcgcattgggttttccaggacttttagcgcgtaggggattgccatcagcgcattggtgaaaatcacgatgccgtcggcggattccggtaagccaacgctgttattgagcagtaaaaagaagcctgtcgccagcacgatccccggcatcgcgaggatcaacattccgctgagttccagcgtttgtccggcgaatagttgctggcgttggcgtagctcgcggctactccacagcagcatcatggtcagcaccacacacagaacgcccgccgccagcgcaatgcgtagcgatgtccagacagcctgccacagaatgggttgcgccagcacctccggcaggctgcggttgacgccatcgaccaccacggcgaccagcggcggaagcagcagcagcagcgccagcacgattaataaggcgtccgtcagacggctgtggagacgatcgtcaggatcgcgccagccctgcgtcagcgtcatccccggcgcaatcgctttgctcaaccgttggcttagcagtaccagcgccaggcagcagaccatctggattaatgccagcatcgccgcgcgggcgggatcgtagtcataactgagcgcctgaaagatagccagttcgatagtggtggcctgcgggccgccgccgagcgacagaaccgttgcgaaactggcgaagcagagcataaaaatcagcgccgcgacaggcggaatttggcggcgcagccacggccattcgacaaaacggaaaaaatgccagccgcgcataccgagctgggcggcgagctggcgctgctcgccgggaatgctttccaaagattgcagcaacaaacggctcgccattggcaggttaaaaaagacgtgcgccagtaaaatgccctgcaagccgtagggggagaatgtccactgaagccccagcatctgccacagcgaggccagccagccctgacggccatacacgctaagaatgccgaacacggcaaccagtaccggcagaatcagcgtcatggcgcacagacgcagcagcgccagacgtccaggaaaacggcgtcgataaagcgcgcgggcgagaaaaaccgccgggaccacagacagcactgcggacagaaacgcctgccagaatgagaagcgcaccacatgccacaggtagctatcccgccagattgtcgaccacgcgcccgacggcgcattcagccaaagcgccagaaaggccgccagcgagacggttatcatcagcgcggcggcgcacagccccggaatcagccagccgggaattaacggctgacggcgcgttgccattcgctaatccatgcctggcgttgtgctgccacttgttgcggcgtgaattccagcgttgtggcgggtttggccaatgattcaaaccctgcgggtaaggcgacgtccgctaccgggtacatccagttgccggtgggtatggcgttctgaaacgccggagaaaccataaatttgaggaatttctccgccagttccggctgcttactggcgacggtacgcgccgcgacttctacctgtaagtaatggccttcgctgaagttcgcggcggcgtaattgtccttcttctcttcaataatgtgatacgccggagaggtggtgtaactgagcaccaaatcgctttcacctttcagaaataaaccgtaggcctcgctccagcctttcgtcaccgtcaccgttttggccgccagtttttgccaggcctgcggcgcgttatcgccatagactttgcgcatccacagtaacagccccagccctggcgtactggtacgtgggtcctgataaatcacccgccatttttgatcgctctcgaccagttctttcaggcttttcggcggatttttcagcttgcttttatcgtagacaaaggcgaaatagccgtaatcgaatggcacaaatgtgtcgtttttccagccgccgggcaccttgaccgcttcattcgccacgccgcttttggcaaagagtttagtttgcgtggccgcttccagcagattgttgtccagccccaacaccacatcggctttgctgttcttcccctccatccgcaggcggttgagcagcgaaacgccatcctccagcgccaccagtttcagctcgcagttgcaatcggcttcaaacgcttttttcaccgccgggcctggcccccagtcggcggcgaacgagtcgtaggtatagacggtgagaacgggtttggcgaaagcaggcgccgcgcacaggagtaaaagtggaagatatttttttaacactttgcacctcagttaaagagtggcaaaggacttgagaggtagcctcaaatcccttcgccggcattatccggatcaggttcgacgggtattttctcagcgcgcgcatgagcgcggcaccccgttgagttcggcgttagtgtagtgattttgttgccgggcagcaatcaagagctggcgttaaggatctggcggcgcaaaccacgccgatttaaaatcaaaccagccgagggtattcatgcgcagcccgcgcatactgcgctgtccctggataatcagccagtggtggatcaacggcacaatcgctttgttggccagcagttgctggcaccagttcgccaggttcatctcgccagcgcgccactgcgcggcgtcgccctgccagtcgcgcggaatgcagttctgcaagagcggtacttcgcacaagtgcgcgaacagcgagaaatccagcggcagcgtaaagttagcgctattgagccagatatcgctttcgatctcgccggcgtgccattgatcgtagtcgatctcctgaatatgcagatgcacctgatgttcagccagaagcgcgctcatgatacgggcgataacccggtgctcaatgtgttcgcgatagaaggtcagcgtgagggtttccagcccggcgggtttttcgcccgggcctggacgggcgtgatgccagcgcggtaaaagcccataggccgggaaccagagctgctgtagcggttcatcggcatgatagagtaaattggtgggggagaggacgtggcttacccattctctgacctgcggatgtgcgccgcgcggcgttctggcgtcgaatagcaggtaatagcacccctcttccagtcggctttctatcgctttttcaccgccttgtatcggcccttccagcatcaagccgcaggccggttcttcactgatatccggcagtacccagacgttcacttcgtctatcaacgcccgatagccgaagtaatcatcaaaggcgagtatcttgagctggtttggcgtattacgccgcacggcataaggcccggtgccgatagggtggctggcgaaattagccagcgtttcccactcccgcggcaaaatcatcgccgggacctggcccagcagccacggcaaccagcgatccggctgggaaagatgaatatccagcgtccacgcggtaggggagtctatctttgtgatgtgcgagtaaagcggaagcgtattgatacgcgtcagcgaggagatgacatcttccatctccagctcgcggccatgatgaaaatgaatgccggggcgcaggtagaagcgccacagtaaaggggaaatttgctgccagtggtgcgcaatgtccgcttccagttccccgttttcctcatttacccgcgtgagcgaactgaaaatttgccgggcaatatgagtttccgagcgacgtaatgcggttcccggcagaagattgtgcatcggacgatagtaaagaacccgcagaatatgccgcccctggcggaagctgcgtcccagatgggaaatcagcatttgcctgacagcgcttttatcgccgaccagttgtaccagttgatcgattcgatcttgttccagcaggtcttccgcccgctgctgttgcagcgccagtccggtatacaggaacgtcagacgcgaacgctttccgcgtccaacctcggcttcccatgttagccaaccgcgcgcctgcatcgtatttagcagcgtacgcatatggcgacgcgaacagttcagcagatccgccagctcattaagcgtggtgtcttgcgttttaccgtcacaacattgccagagacggataaattgttgttgcaggcgacctgagggcataaaaggggaactccgatgaaaaactcagcaattttattatccctatattaggccaataatatctttcgatgaagcaagaggaagaggtcactatgcgccagttctggttgagatattttgccgcgacggaaaaaacgtcctggctggcttgcctgagcgcaccgcagcgcttaaaaatgctcgcggaactgatgcagtgggaggcgaccgattgaagccaattgcagacatcatgtgtgactgagtattggtgtaggcgatagcctaaaatcacccgccagcagataatatctgctggctttttttatttcggctgtttctggatgacgatgatgggacggcgtttcaacgggatttatacggcggtttctgtggtcacgcaggtggtgaccgggcgagtaaaaatcgtataaaaaatgccggaatatccccggcatgagcgactgatgagtaacccggagcttgatggcgctacgcttatcaggcctacagaatataatggcaaccgggtgatattgcataacctgtaggcccggtaaggcgtcaagggttaccgcataaatgccggttgtttattttcgtaggcggcaatcgcgtcttcgtgctgcagcgtcagcccaatgctgtccagaccgttcaacatgcagtggcggcggaagtcgtcgattttaaagctgtaggttttatcgcctgctttcaccacctgtgcttccagatccacttcaaatttaatgcccggattggctttcaccagggcaaacagctcatcgacctgtgcgtcgctcagggttaccggcagcagttgattattgaaactgttgccgtagaagatgtcggcgaagcttggcgcgatcaccactttaaagccgtaatcggtcaacgcccacggcgcgtgctcgcgtgacgagccgcagccaaagttttcccgcgccaacagtatcgacgcgccttgatattccggaaagttcaacacgaattccggatttggctgttggcccttttcgtccaggaaacgccagtcgttaaacagatgggcgccaaaaccggtgcgcgtaaccttctgcaaaaactgtttagggataattgcatcggtatcgacgttggcggcatccagtgggacaaccaggccggtatgctgggtaaatttctctgccatggtagtttccttatttgatgctgcgaatgtcggcgaagtggccggtaacggcggcagcggcggccatcgccgggctgactaaatgcgtgcgacccccgcggccctgacgaccttcaaagttacggttgctggtggaggcgcagcgctcgcccgggttcaggcggtcgttattcatggccaggcacatggaacagcccggtaagcgccattcaaatcctgcttcgataaagatcttgtccagaccttccgcttccgcctgcgctttcaccggacctgaacccggcaccaccagcgcctgcacgcccggcgcaactttgcgccctttggcgacttccgccgccgcgcgcaaatcttcaatgcgtgaattggtacaagagccgataaagactttatcgatagcaacgtccgttaacggtacgcccggctgtaagcccatataagccagcgctttttcggcgctggcgcgctcaaccggatcgctaaaggaggcgggatcggggatgatgtcggtgacggaaatcacctggcccggattcgtgccccaggtcacctgcggcgcgatctcttctgctcgcagggcgacgacagtatcaaaggtcgcgccgtcatcggttttcagcgttttccagtactcgacggcttcgtcaaaatcgcggcccttcggcgcgtgcaaacgcccttttacgtagttgaaagtggtttcatccggggcgaccagaccggctttggcgcccatctcaatcgccatattgcacagcgtcatgcggccttccatactcagcgcgcggatagcgtcgccgcaaaattcaaccacgtgtccggtgccgccggcgctaccggttttaccgatgatcgccagcacgatgtctttggcggtaatgcccggcgcggcgttgcccgtgacttcaatcttcatggttttagcgcgtccctgtttcagggtttgcgtcgccagtacatgttctacctcagaagtgccgatgccgaaggccagcgcaccaaacgcgccgtgggtggcggtgtgggagtcgccgcagacgatggtcatgcccggcagggtgacgccctgttccggccccatcacatggacgatgccctgatatgggtgattcaggtcatacagctcgacgccgaactcgttacagttcttaatcagctcctgcatctggatacgcgccatttcaccggaagcattaatgtctttagtctgcgtcgagacgttgtgatccatcgtagcgaaggttttccctggctgacgtaccggacgatggtgcgcgcgcagaccgtcaaacgcctgcggagaggtgacttcatgcaccaggtggcggtcgatgtacagcagcggcgtttcgtttggcgcctcaaagaccacgtgggcatcaaataatttttcgtataacgttttggccatgattacaccccttctgcgacatagcgggcgataatatcgcccatctcatcggtactgactgcggcagcgcccctggctaaatcgccggtgcgaacgccctcttctaatgcgcgattgatcgcctgttcaatggccgttgccgcatcgttggcatccaggctgtagcgcagcagcagcgccagtgacaggatctgcgcaattgggttggcgatatttttcccggcgatatccggcgcggagccgccagccggttcatacaggccaaacccttgctcgttcaggctggcggagggcaacatccccattgagccggtgatcatggcgcattcgtcggacagaatgtcgccgaacaggttagagcacagcagtacgtcaaactgcgacgggtctttaatcaactgcatggtggcgttatcgatatacatgtgcgcgagttccacatcgggatacgttttcgcgacatcattgacgatttcacgccacaggatagagctttgcagtacgttggctttatcaatagaggtgactttacggcggcgtttacgcgccgattcaaaggcgatacgggcaatgcgctcgatctcaaagcggtgataaacttcggtatcaaaggctttttcgtactgaccgctgccttcacggccttttggctgtccgaaatagatcccgccggtcagctcgcgcacgcacaggatatcgaaaccgttagcggcgatatcggcgcgcaacgggcaaaatgcttccagtccctgatacagtttcgccggacgcaggttactgaataatttgaaatgtttgcgcagcggcagcagggcgccgcgctccggctggctttccgggggcaaattttcccatttcgggccgccgacggagccaaacagaatggcatccgcctgctcgcacccttcaacggtggctttcggcagtggatgaccatgattgtcgatagcaataccgccgacgtcatagtggctggtggttatacgcatatcaaaacggctgcgtaccgcatccataactttcagggcttgcgccatgacttccgggccgataccgtcgcccggcagtacggcaatatgatagttcttcgacattacacggtttccttgttgttctctttattttgagctttgcgttgcaattctttttcaacttcggcggcgcgccagatattgttcagtacgtgcaccatcgctttggcggaggattcgacgatatccgtcgccagcccgacgccgtggaagcggcgaccatgatggttcacgacgatatcgacctgacccagcgcgtctttgccctggcctttggcgttcaggtcgtatttaaccaactcaacgtcgtagccagtgatgcggttaatcgcctgatagatggcgtcgaccggaccgttgccgttcgccgcttcggccttgatctcttcaccacaggccagcttcacggaagcggtggcgatatcgctggagccggactgcacgctgaagtaatccagacggaaatgctctggttcttcttgctgtttattaataaacgccagcgcttccaggtcatagtcgaacacctggccttttttgtccgccagcttcaggaacgcgtcgtacaggtggtccatgttgtagtctgtgtccttgtaacccatctcttccatgcgatgtttcacggcggcacggccagagcgggaggtcaggttcagctgtatctggttcagaccgatggactctggcgtcatgatttcatagttttcgcggttcttgaggacgccatcctggtggatgccggaagagtgggcgaaagcgccgctgccgacaatcgctttgttggctgggatcggcatgttacagatctggctgacggtctggctggtgcgccagatttcgtggtgattgatgttggtgtgtacgttcatgatgtctttgcgcactttaatcgccatgatcacttcttccagtgcgcagttaccggcacgttctccgataccgttcatcgcgccttcaacctgacgcgcgcccgcatgtactgccgccagcgagttgcctactgctatccctaaatcgtcgtgggtatgaacggagatgatagctttgtcgatattggggacacgttcatacaggccggaaatgattcccgcaaactcaaacggcatggtatagcccacggtatcgggaatattaatggttctcgcgccggcgtttatagcggcttccaccacgcgcgccagatcgtcaacaggcgtccggccagcatcttcgcaggagaactctacgtcatcagtgtaattacgcgcccgcttaaccatgtataccgcgcgttcgataacctcatccagcgtgctgcgcagcttggtggcgatgtgcattggcgaggtggcgataaaagtatggatgcgaaacgcgtcggcgaccttcagcgcctgtgccgcgacgtcgatgtctttttctacacaacgcgccagggcgcaaacgcggctgtttttaatggtgcgggcgatggtttggacggattcaaaatcacccggagaagagaccgggaagcctacttccatgacatcaacacccatgcgctcaagggccagggcaatctgcagcttctctttcgcgctcaggctggcctgtaacgcttgttcgccgtcgcgtaaggtcgtatcaaaaataatgacttgctggctcatgatgtggtccttgtctccaggggcgccttgcgtcaggcataaaaaaacccgcgcaacggcgcgggttttgtttgacttcgagctgacttaatgttgaatgccgcccaccggtctaccgcgcacaataaatgcgttgagtagtagtagcccagtgaaacgaacgatatgtgacattaattcagctccagcgaatgcgttatgcttttagtggtactggatatgccgtttaatgtcaactctattttctgtcgccattgcattttgttgacgatatccggatacgtactttagctaattgtgctgggctgcgcgtccaataaaggataaaagaacgagtggacattcatacttttcattgtttgaaatatttaggcatttttgtttgcaaattggttaggggaatggcctgttaaaggtatgctaaaggtttggtttatctttttgatttgttttatattttaacaaataaccttgtttgcttaatggataaggataaagttattgataaattaatgttaactttttagctattaataatataaacatttaattgaaacttaaatgatcattcacttggtgtatgattgtgtattcgccatagttatggttatattgcttgcgtaatttaaacattatgaatcgcaatggtgtgactcaggacacattacgcttgcgctggcattctatttgtctctgtcagcgtctttatgttttccgaattttaacgctttccctttttcttattttatatgcatggtaaatcatattttcaggaattatttctgccttcagccagaaaaagggagttaagcgtgacagtggagttaaatatgccagaggtcaaaaccgaaaagccgcatcttttagatatgggcaaaccacagcttcgcatggttgatttgaacctattgaccgtgttcgatgcggtaatgcaagagcagaatattacgcgcgccgcccacacgctgggaatgtcgcagcctgcggtcagtaacgccgtagcgcgtctgaaggttatgtttaatgacgaactttttgttcgatatggacgaggaattcagccgactgcccgtgcatttcagttatttggttcagtccgtcaggcgttgcaattggtgcaaaatgaattgccgggatcggggtttgagccgaccagcagcgaacgtgtattcaatctttgcgtgtgcagtccgctggataatatcctgacgtcacagatttataatcgtgtagaaaaaattgcgccaaatattcatgtcgtttttaaagcgtcgttgaatcagaatactgagcatcagttacgctatcaggaaaccgagttcgttattagttatgaagaattccgtcgtcctgagtttaccagcgtaccgctatttaaagatgaaatggttttagtcgccagccgaaaacacccgcgtattagcggcccgctactggaaggcgatgtttataatgaacaacatgcggttgtttccctcgatcgttatgcgtcatttagtcagccgtggtatgacacgccggataaacagtcgagcgtggcttatcagggcatggcgcttatcagcgttctgaacgtggtttcgcagacgcatttggtcgctattgccccgcgctggctggcggaagagtttgcggaatcgctggatctgcaaatattgccgttgcctttaaaactgaatagccggacatgctacctttcctggcatgaagcggctgggcgtgataaagggcatcaatggatggaagatttattagtctctgtttgtaagcgataaaaccgggcagaataaatcagaaacaaattctggtttattctgctttttagcgtatatcaaaaattttatgctgaattaacggtgagcgatgcttttcgtcgctgtgaaaaatagatgaattgctgtaagtctgcatttataagcgattatttattaccaggtgtgattcagacggagtatttctccatttcttctcttcttgcctcctgattattctaaccttccccatctttacgtcattccacccaattgccaggcgtgatagcgagcggttaaggtgtccgtcaaaccgtgatgacaggtataaagtggaggcaagccgtggaaatgttgtctggagccgagatggtcgtccgatcgcttatcgatcaaggcgtaaagcaggtgttcggctatcctggaggcgcagtgcttgatatttatgatgcgctacataccgttggagggatcgatcatgtgctggtgcgtcatgagcaggccgcggtgcatatggcggatggcctggcgcgagccactggcgacgttggcgtggtgctggtgacttccggaccgggagcgaccaatgcgattaccgggattgctacggcctatatggattccattccgctggtgattctttccggccaggtcgccacctcattgattggctatgatgcctttcaggagtgcgacatggtggggatttcccgaccggtggtcaaacatagcttcctggtcaaacagacggaagatattcccctggtgcttaaaaaggccttctggctggcggcaagcggacgtcctgggccggtggtcgtggatttgccgaaagatattttgaatccggcgaaaaaaatgccgtatgcctggccggagacggtcagtatgcgctcttacaatcccacaacatcaggacataaaggacaaattaagcgtgccttgcaaacgctggcgtcggcaaaaaagccggtggtctacgttgggggaggggcgataagcgcggcctgctatgcgccgttgcgccacatcattgaaacctttaacctgccggtggtctcttcattaatgggactgggcgcatttcctgctactcatcgccagtcgttaggaatgctgggaatgcatggcacttatgaagccaatatgaccatgcataacgccgacgtgattttcgctgttggcgtacgatttgacgaccgcacgacgaataatctcgctaaatattgtccgaacgcgacggtattacacatcgacattgacccgacgtccatatccaaaacggttaacgctgatatcccggtggtgggcgatgcccgcctggtactggaacaaatgctggagctactggcgcaggatgcgccgtctcagccgcaggatgatattcgcgactggtggcagcagatagagagctggcgcgcccgtcagtgcctgaaatatgacgcggaaagcgaaagcattaaaccccaggcggtgattgaaaccctctggcgtctgacgaagggcgatgcgtacgtgacgtccgatgtaggacaacaccagatgtttgccgccctctattacccgttcgataagccacgtcgctggattaattccggcgggctcggcacgatgggttttggcctaccggctgcgctgggcgttaaaatggccctgccgaaagaaatggtggtctgcgtgaccggcgatggcagtatacagatgaacattcaggagctgtcgacagccttacagtatgaactgccggtactggttttgaacctgaacaaccgttatctggggatggtgaaacagtggcaggatatgatctattccggtcgccattctcagtcttatatgcagtcgttaccggattttgtgcgcctggcggaagcatatggccatgtcgggctgcagattaaccgtccggatgagctggaaagtaaactcagcgaagcccttgagcatgtgcgtaataaccgactggtgttcgtcgatgtcaccgttgatggcagcgagcatgtctatccgatgcagattcgcgggggcgggatggacgaaatgtggttaagcaaaacggagaggacctgatgatgcgccggattttatcggtattactggaaaacgaatctggggcgttatcgcgggttatcggcctcttttcgcaacgcggatataatattgaaagcctgaccgtcgcgccgacagacgatccgacgttgtcgcgcatgactatccagacggtaggcgatgaaaaagtgcttgagcaaattgaaaagcaactgcacaagctggttgatgtgctgcgcgtcagcgagctgggacagggagcgcacgttgagcgggaaatcatgctggtgaaaatccaggccagcggctacggacgggaagaggtgaagcgtaatacggaaattttccgtggtcagattattgacgttacgccaacgctgtataccgttcaactggcgggcaccagcgataaactggatgcttttctggcctcgctgcgcgacgtggcgaaaattgttgaagtggcgcgttcaggcgtcgtcgggctttcgcgcggcgataagattatgcgctgagcagattcgccggatgacgacgcgcgtgcgttttatccggtctactggctgatatctggcccaggtccgataagcgtagcgccatcaggcaggtttgccggatatcagccaacaggaattatcgcccaacccaatatcatcggttgggcttttttttgcgaaatccgtggtaacccggaataaaagcggttgccggagtgatcaaactgcgcttagatgttaacgattttaacccatgccgacataaaggttatggtttgtacaatttacacaaggggcaattgtgaaactggatgaaatcgctcggctggccggtgtctcgcgcacaactgcaagctacgttataaacggtaaagcaaagcaataccgcgtgagcgacaaaaccgtagaaaaagtcatggcggtagtgcgtgagcacaattaccatcctaacgctgtggctgccgggctgcgtgctggacgcacacgttccattggtctggtgatcccggaccttgaaaacacgagctacacccgtatcgcaaactatcttgagcgccaggcacgccagcgtggctaccaactgctgatcgcctgttctgaagatcagccggataacgaaatgcgctgcattgagcaccttttgcaacgccaggtggatgcaatcattgtttcaacttcgttaccgccggagcatcccttctatcagcgctgggccaacgatccgttccccatcgtcgcgctcgaccgcgcgctggatcgcgaacatttcaccagcgtggtcggcgccgatcaggatgatgccgagatgttggcggaagagctgcgtaaattcccggcggaaacggtgctttatttgggcgcgctgccggagttgtccgtcagtttcctgcgcgagcaggggttccgcaccgcatggaaagacgatccgcgggaggtgaatttcttatatgccaacagctatgagcgcgaagccgccgcgcagttgtttgagaaatggctggaaacgcatcctatgccgcaggcgctctttacgacatcgttcgcgctattacagggcgtgatggacgtaacgctgcggcgcgatggaaaactgccttcggatttagcgattgcgaccttcggcgatcatgagctgctggattttctgcaatgcccggtactggcggtggcgcagcgtcatcgtgatgtcgcggaacgcgtgctggagattgtgctggcaagtcttgatgaaccgcgtaaaccgaaacccggcttaacgcgtattcggcgaaacctttatcgtcgcggcattctgagccgtagctaaaggaccggcggtaaaagactctctcttctgccgccgtcaaacaaatgcgtatcagtaaaaatatcccttaaataattaagattattccttaaaattatccgaaaattcttttttattacctttcttttgtccgaaatcgtccacattccactaattaagacgtaacgagtcttttcctttgtattgttttgttacaagcaggcaagaaatcgtcgaattaacagccactttttgtctttggcgcgacagtcgctcgtaggcgctggtatagcaggcaccgcacacgttaaacaggcactgttaacacggtgcaatatgtcctaaaatgccgctcgcgtcgcaaactgacactttatatttttctcggattatattgagtccgttttaaacggcggtgggcctttggtttttttcttacaaatattcataacgttaatttggcttgcacgctgggcggaaattaatcaacgcagatattcgccgtaaacattggcttttttacttaggtaagcgttgtgacttgcttgacaagcttttcctccgctccgtaaactccttcgagtgggaatttgtgggataaagtggtaagaaggggtgagactggcatgttccggggggcaacgttagtcaatctcgacagtaaagggcgcctgaccgtgccgacccgttatcgggagcaactgatcgagagcgctaccggtcaaatggtatgtaccattgacatccatcacccatgcctgctgctttaccccctgcctgaatgggaaattattgagcaaaagttatctcgtctgtcgagcatgaacccggtagaacgtcgcgtacagcgtttactgttgggccatgccagcgaatgtcagatggatggtgcaggtcgattactgatcgcgccagttctgcggcaacatgccggactgacgaaagaagtgatgctggttggacagttcaacaaatttgagctgtgggatgaaacgacctggtatcaacaggtcaaggaagatatcgacgctgaacagtcagctaccgaaacgttatcggagcggctgcaggacttgtctctataagatgatggaaaattttaaacacactacggtactgttggatgaagccgttaatgggctgaatattcgtccggatggtatctatattgatggcacatttggtcgcggcggccactcgcgcctgatcctctcgcaactgggcgaagaggggcgcttgctggcgatcgatcgcgatccgcaggcgatcgccgttgcgcagaccattaatgatcctcgcttctccatcattcatggacctttttccgcgctggctgattatgtagccgagcgcgagcttaccggcaagattgacgggatccttctcgatcttggcgtctcttctccgcagcttgacgatgcggagcgcggtttttcatttatgcgcgacggtccgctggatatgcgaatggacccgacgcgcggccagtctgccgccgagtggttacaaacggcggaggaagcggatatcgcctgggtgctgaaaacattcggcgaggagcgttttgccaaacgtattgctcgcgccattgttgagcgcaatcgcgaacagccgatgacccgcaccaaagagctggcggaagtggttgcggcggcgaccccggtaaaagacaaattcaaacatcccgcgacccgtaccttccaggcggtgcgcatctgggtaaacagtgaactggaggagatagagcaggcgctaaaaagctcgctcagcgtactggccccaggcgggcggctttcaatcatcagtttccactcgctggaagaccgtattgtgaaacgctttatgcgtgagcaaagccgcggtccgcaggtaccggcgggattaccgatgacggaagcgcagctcaaaaaactgggcggtcgtgagttacgagcgttaggcaagttgatgccgggtgaaaaagaggtagctgaaaatcctcgggcccgtagttcagttctgcgtatcgcagagaggacgaacgcatgatcagcagagtgacagaagccctaagcaaagtgaagggatcgataggaagcaacgagcgccatgccttgcctggcgtgatcggtgacgatcttttgcggttcgggaagctgccactctgcttgttcatttgcatcattttaacggcggtgacggtggtcacgacggcgcaccatactcgtttactcaccgcgcagcgtgaacaattggttctggagcgcgatgcattggacattgaatggcgcaacctgatccttgaagaaaatgcgctcggcgatcacagccgggtggagcggatcgcaacggaaaagctgcaaatgcagcatgttgatccgtcccaagaaaatattgtagtgcaaaaataaggataaacgcgacgcatgaaagcagcggcaaaaacgcaaaaatcgaaacgccaggaagaacagaccaacttcatcagttggcgttttgcgttgctgtgcggctgtattttactggcgctggtttttttacttggacgcgcggcgtggctacagattatcgccccggatatgctggtgcgtcagggcgatatgcgttcgctgcgtgttcaggaagtctccacctcacgcggtatgattaccgaccgttccgggcgcccactggcggtcagcgtaccggttaaggcgatctgggccgacccgaaagaagttcatgacgccggcggcatcagcgttggcgatcgctggaaagcgctttctactgcgctcaatattccactcgatcagctctccgcccgtatcaacgccaacccgaaagggcgttttatttatctggcgcgccaggtaaatcctgacatggcggactacatcaaaaaactcaaactgccggggattcatttgcgtgaagagtcccgccgctactacccgtcaggagaagtaaccgctcacctcatcggttttaccaacgtcgacagtcaggggattgaaggcgttgaaaagagctttgataagtggcttaccggtcagcctggcgagcgaatcgtgcgtaaagaccgctatggccgcgtgattgaggatatctcctccactgacagtcaggcagcgcacaatctggcgttaagcattgatgaacgcttacaggcgctggtttaccgcgaactgaacaacgcggtggcgtttaacaaggcggaatccggtagcgcggtgctggtcgatgtcaataccggtgaagtactggcgatggcgaatagcccttcctataaccccaacaaccttgccggtacgccgaaagacgcgatgcgtaaccgtaccatcaccgacgtgtttgaaccgggttctacggttaagccgatggtggtgatgactgcgcttcagcgcggtatcgtcaacgaaaatacggtgttgaataccgttccataccgaattaacggccacgaaattaaagacgtggcgcgctacagcgaattaaccctgaccggggttctacagaagtcgagtaacgtcggtgtatccaaactggcgttagcgatgccgtcctcagcgttagtagatacttactcacgttttgggctaggaaaggcgaccaatttggggttggtcggagaacgcagtggcttatatcctcaaaaacaacggtggtccgacatagagagggccaccttctctttcggctacgggctaatggtaacgccgttacagttagcgcgagtctatgcaaccatcggcagctatggcatttatcgcccgctgtcgattaccaaagttgatccgcctgtacccggcgaacgcatcttccctgaatccaccgtacgcaccgtggtgcatatgatggaaagcgtggcgctgccgggcggcggcggcgtgaaggcagcgattaaaggctaccgtatcgcgattaaaaccggtacggcgaaaaaagtggggccggacggtcgctacatcaacaaatacattgcttacaccgcaggcgtcgcgcctgcgagtcagccgcgcttcgcgctggtggttgtcatcaacgatccgcaggcgggtaaatactacggcggcgccgtttccgcgccggtatttggtgccatcatgggcggcgttctgcgcaccatgaacatcgaaccggacgcgctggcaacgggcgaaaaaaatgaattcgtaattaatcaaggcgagggaacaggtggcagatcgtaatttgcgcgaccttcttgctccgtgggtggctggactacccgcgcgagaactgcgagagatgacgctcgacagccgtgtggctgcggcgggcgatctctttgtggcagtggtgggtcatcaggcggacgggcgtcgatatatcccgcaggcgatagcgcaaggcgtagctgccattattgcagaggcgaaagacgaggcgagcgacggtgagattcgcgaaatgcacggcgtaccagtcgtctatctcagccagctcaatgagcgtttatctgcgctggcgggccgcttttaccatgagccatctgaaaacatgcgtctggtggcggtgaccggcaccaatggcaagaccaccaccacccaactactggcgcagtggagccagttgctcggcgaaaccagcgcagtgatgggaacggtaggcaacggactgttgggtaaagtgatcccgacggagaacacaaccggttccgctgtggatgttcagcatgtgctggccagtctggttgcgcagggcgtgaccttcggcgcgatggaagtctcttctcacggcctggtgcagcatcgcgtggcggcgttgaaatttgccgcctccgtgtttactaatttgagccgcgaccatctcgactatcatggcgatatggcgcattacgaggcggcaaaatggatgctttattccacccaccatcatggtcaggcaatcgtcaacgccgatgatgaagttggacgccgctggctggcgtcgctacccgatgcggtcgcggtatcaatggaagggcatatcaaccctaactgtcacggtcgttggctgaaagcggaggcggtggagtaccacgaccgcggagcgacgattcgttttgcttcaagctggggtgaaggcgaaatcgaaagccgcttgatgggcgcgtttaacgtcagcaacttactgctggcattggcgacgctactggcgctgggctatccgttaacggatttgctgaaaaccgccgcgcgtttgcagccggtttgcgggcgtatggaagtgttcactgcgccaggcaaaccgacggtggtggtggattacgcgcacacgccggatgcgctggaaaaagcgttgcaggcggcgcgtctgcattgcgccggaaaattgtggtgcgtctttggctgtggcggggatcgtgacaaaggtaagcgcccactcatgggggccattgccgaagaattcgcggatatcgtcgtggtgactgacgataacccgcgtaccgaggagccgcgcgccattatcaacgatattctggccggaatgctggacgccgggcaggtcagggtaatggaaggccgcgctgaggcggtaaccaatgccattatgcaggcaaaagacaatgacgtcgtgctgattgcaggtaaagggcacgaggattaccagattgtcggcacgcagcgtcttgattattcagaccgcgtgaccgcagcgcgtttgctgggggtgatcgcatgattagcgtaacgctcagcaaaattgccgatgtccttggcgccgaacaccgcggggcggatctcacgctcgatacggtcattaccgacacacggaaagtgacgccgggatgcctgttcgtggcgctgaaaggggaacgctttgatgcgcatgattttgctgataaagcaaaagcgaacggcgctggcgccctgctggtcagtcgtcctctggatatcgatctcccgcaggtgattgtaaaagacacgcgtcaggcatttggccaactggccgcctgggtacgtatgcaggtaccggcgcgggtggtggcgttaaccggttcgtccggcaaaacctcggtcaaagagatgaccgccgcgattcttagccagtgcggaaatactctgtataccgcaggcaattttaacaacgacatcggcgtgccgataacgctgctgcgcttaaaccatgattatgactatgcggtaatcgagttaggcgctaatcaccagggagaaatcgcctggaccgttagcctgacgcgcccggaagcggcgctggtcaataacctggcggcggcgcatctggaaggcttcggctcgttggccggcgtggcgaaagcgaaaggcgaaatctataccggtttgcctgagaacggtatcgcgattatgaatgccgataataatgactggctgaactggcaaagcattattggcgatcgtctggtgtggcgcttttcgccgaatgcggcaaacagcgactttaccgctgcgaatatccacgtgacgtcacacggtaccgaatttaccctgcaaacgccgatgggcagcattgatgtgctgctgccgttgccggggcggcacaatattgccaacgcgctggcggccgctgctttatcaatggcggtgggggctacgctgacggcgattaaagcagggctggcggcgttaaaagccgtacccgggcgtctgttcccgattcagctaagtgaaaaccaactggtactggatgacgcttataacgccaacgttggttcgatgaccgccgcagtgcaggtcctttctgaaatgcccggctaccgcgtgctggtggtaggcgatatggccgagctgggcgcagaaagcgaagcgtgccacctccaggttggtgaggccgcaaaagcggcgggtattgatcgcgtgttaagcaccggaaaactcagtcaggctatcagccacgccagcggcgtcggcgaacattttgccgataaagccgcgctcattgcgcgtttacacgctctgcttcaggagcaaccaatgatgactattttagtgaaaggatcacgcagcgccgcgatggaagatgtggttcatgcgttacaggagaaaggttcatgttagtttggctggccgagcatttggtcaaatattattccggctttaacgtcttttcttatctgacgtttcgcgccatcgtcagcctgttgaccgcgctgttcatctctttatggatgggcccgcgtatgatcgctcgtctgcaaaaactctcttttggccaggtggtacgtaacgatggcccggaatcgcacttcagtaaacgcggtacgccgacgatgggcggcatcatgatcctgacgtcgattgtgatttccgttctgttatgggcttacccgtctaacccgtacgtctggtgcgtgctggtggtattgatcggctacggcattatcggttttgtcgatgactaccgcaaagtggtgcggaaagataccaaagggctgattgcgcgctggaaatatttctggatgtcggttatcgcgctcggcgtggcctttgcgctttatctcgtcgggaaagacacgcccgcgacccaactggtggtgccgttctttaaagatgttatgccgcaattggggctgttttacattctgctgtcctactttgtcatcgtcggtacgggtaacgccgtgaacctgaccgacgggcttgatggtctggcgattatgccgactgtcttcgttgccgccggctttgcgctggtggcctgggcgaccgggaacatgaacttcgccaattacctgcatattccgtatttacgccatgcgggcgagctggtgattgtctgtacggcgattgtcggcgcgggattaggattcttgtggtttaacacctatccggcgcaggtttttatgggcgatgtcggatcgctggcgttgggcggtgcgttgggcattatcgccgtgctgctgcgtcaggaatttctgctggtgatcatgggcggcgtctttgtggtggaaactctgtcggtcatcctgcaggtgggttcctttaaactacgcggacagcgtattttccgtatggcgcctatccatcaccactatgaactgaaaggctggccggaaccgcgcgtgattgtgcgcttctggattatttcgctgatgctggtgctgattggcctggcaacgctgaaggtacgttaatcatggctgattaccaggacaaaaacgtcgtcattattggtctgggcttaaccggactctcttgcgtggacttttttctcgcccgcggcgtgacgccgcgggtgatggatactcgcgtgacgccgccgggtctggataagctgccgcaagaggttgagcgtcacgttggcggcctgaacgacgagtggctcttagcggcggatttaatcgtcgccagccctggtattgctctggcgcatccctctcttagcgctgccgccagcgctggagtggaaattgtcggcgatatcgaactgttttgccgcgaagcgcaagcgccgattgtggccatcaccggctcgaacggcaaaagcaccgtgaccaccttagtgggcgagatggcgaaagcggcgggcgtcaatgtcggcgttggcggcaatatcggtcttccggcgctgatgctgctggatgccgatcgcgaattgtacgtgctggaattatccagtttccaactggaaactacctcaagtttgcaagcggcggcggcaacggtgctcaacgtcactgaagatcatatggaccggtatccgtttggtttgcaacagtaccgggcggcgaaactgcgcgtctacgagaaggcgaaagtgtgcgtagtgaatgccgatgacgcgttgacgatgccggtacgcggggccgatgaacgctgcgttagctttggcgtcaatatgggcgattatcaccttaatcgtcagcagggcgaaacctggctgcgagtcaaaggcgagaaggtgctgaacgtgaaagagatgaagctttccggtcagcataactataccaatgcgttagcggcgctggcgctggcggatgccgtaggtctgccgcgcgccagcagtttgaaggcgttgacgacatttaccggtctggcgcatcgcttccagctggcgttggagcataacggcgtacgttggatcaacgactcgaaagcgaccaacgtcggcagtaccgaagcggcgctaaacggtttgcatgtggacggtacgctacatctgctgctgggcggcgacggtaagtcggcagacttttctccgctgacacgctatctgaccggcgatcgtatccgcctgtattgctttgggcgcgatggcgcgcagcttgccgcactgcgtccggaaatcgcccaacagactgagacgatggaagaggcgatgcgtttgctggcgccgcgcgttcagccgggtgatatggtgctgctgtcgcccgcttgcgctagcctcgatcagtttaaaaattttgagcaacggggcgatgtctttacccgtctggcgaaggagttaggttgatgcgtttatctctcccccgtctgagaatgccgcgcgtaccaggctttggcctcctggcctggctgtttgcggcgcttaaaggctgggtgatggcttcgcgcgataaagacgccgacagtctgatcatgtatgaccgcacgctgctatggctgaccttcgggctggcggcgattggttttgtcatggtgacgtcggcctccatgccagtcgggcagcgcctggcgaacgatccgtttttgtttgccaaacgtgatgcgctctatatcttcctggcattttgtctggcgatggtcacgctacgtttgcccatgaccttctggcaaaaatacagcacgacgatgctgattgcgtcgatcattatgctgcttatcgtgttggtcgtcgggagctcggttaacggggcgtcgcgctggattgcgctggggccgctgcgtattcagcctgcggagtttaccaagctgtcgctgttctgctacctcgcgaactatctggtgcgtaaggttgatgaggtgcgaaataacctgcgcggctttttaaaaccaatgggcgtgattctggtgctggcggtgttactgctggcgcagcctgacctcgggacggtggtcgtactgtttgtcaccacgctggcgatgctgtttctcgccggggcgaaattatggcagttcatcgccattatcgggatgggcatctcggcggtgattctgttaatcctcgccgaaccgtatcgtattcgtcgcgttacttcgttctggaacccctgggaagatccgttcggcagcggttatcagctgacgcagtcgctgatggcttttggtcgcggtgagatatgggggcaagggctggggaattcggtgcagaaactggagtatttgccggaggcgcacaccgatttcatcttcgccattattggggaagaactgggttatatcggtgtggtattggcgcttttaatggtattcttcgtcgcttttcgcgcgatgtcgattggccgtaaggcattggagattgaccaccgtttttccggatttttagcgtgttctatcggtatctggtttagtttccaggcgctggtaaacgttggcgcggccgcggggatgctgccgaccaaaggtcttacgctgccgctgatcagttatggcgggtcgagtctgttgattatgtcgacggccattatgtttttattacgtattgattatgaaacgcgtctggaaaaagcgcaggcgtttacacgaggttctcgatgagtggtcaaccgaagcggttaatggtgatggcgggcggtaccggcgggcacgtgttcccgggactggccgttgcgcatcatttaatggcccagggctggcaggttcgctggctgggtaccgccgatcgtatggaagcggatttagtgccgaagcatggcatcgacattgactttattcggatctccggtctacgcggtaaaggcgtaaaagcgcttctggcggcgccgctgcggatttttaacgcctggcggcaggcgcgggcgatcatgaagcggtttaagccggatgtcgtgctgggaatgggcggttatgtttccggccccggcggtcttgccgcatggtcattgggtattccggtcgtcttgcatgagcaaaacggtatcgccgggctaaccaatcagtggctggccaaaatcgcgaccacagtgatgcaggcgtttcccggtgcgtttccgaacgcggaagtggtgggtaacccggtgcgtaccgacgtactggcgttgccgttgccgcaggtgcgtctggccggtcgtgacggcccgattcgcgtgttggtggtcggcggttctcagggggcgcgagtcctgaaccagacgatgccgcaggttgccgccagactgggcgatacggttacaatctggcatcaaagcggaaaaggcgcgcagctcacggtagagcaggcatatgccggggcgggacaaccgcagcataaggtaacggaatttatcgatgacatggccgccgcctatgcgtgggcggatgtagtggtatgtcgttccggcgctttaacggtgagcgagatcgccgccgccgggttaccggcgatattcgtgccgtttcagcataaagacaggcagcagtactggaatgcgctgccgttagaaaacgccggcgcagctaagatttttgagcagccgcagtttactgtagaggctgtcgccgacaccctggcggggtggtcgcgcgaggcgttgttaaccatggcggagcgtgcccgcgcggtatccattccggatgctaccgagcgcgtcgccagtgaagttagccgggttgcccggacataatttgtggcggtgccttttgcatcgcagggtttttctaccctcaataatttgggttgcaggcaagccaacgcatctgcaatttgaagtatggcgggtattggagttaatggcgtaaagaatgaatacacaacaactggcaaaactgcgttccatcgtgcccgaaatgcgtcgcgttcggcacattcactttgtcggcatcggtggtgctggtatgggcggtattgccgaagttctggccaatgaagggtatcagatcagtggttccgatttagcgccgaatccggtgacccagcagttgacgagcctgggggcgacgattttctttaaccatcgtccggaaaatgtgcgtgatgccagcgtggtcgtcgtttccagcgcaatttccgcggataacccggaaattgtcgcggcgcatgaagcgcgtattccggttattcgccgtgcggaaatgctggcggaactgatgcgttttcgccacggcatcgccattgccgggacgcacggaaaaaccacaacgaccgcgatggtgtccagtatttatgccgaagcggggctggacccgactttcgtgaatggcggactggtgaaagccgcaggcgttcatgcgcgtctgggccatagtcgttacctgattgccgaggcagatgagagcgacgcgtccttcctgcatttgcagccgatggtcgcgatcgtcaccaacatcgaagccgaccatatggatacctatcatggcgactttgaaaatttaaagcagacgtttattaacttcctgcataacctgccgttctacggtcgcgcggtaatgtgcgtcgatgatccggtcatccgcgagttgctgccgcgggtggggcgtcagaccacgacgtatggctttagcgaggatgctgacgtccgcgtagaagattatcagcagatagggccgcaggggcactttacgctgttgcgccagggaatgccggatctgcatgtcacgttgaatgcgccgggtcgccacaatgccctgaatgccgcggcggcagtggcggtagcgaccgaagaaggcatcgccgatgacgctatcctgcgcgcgctggaaagcttccaggggaccgggcgtcgttttgacttcctcggcgagttcccgcttgagccggtgaatggtaaagccgggacggcgatgctggtggatgactatggtcatcatccgactgaagtagatgccaccattaaagctgcgcgagcagggtggccggataaaaacctggtgatgctgtttcagccgcaccgttacacgcgcacgcgcgatctgtatgacgatttcgccaatgtgctgacccaggtcgatgcgctgctgatgctggacgtttacccggcgggtgaagcgccgattccgggcgcggatagccgttctttatgtcgtacgattcgtaatcggggaaaaattgacccgattctggtttccgatccggctcaggttgcgacaatgttagcgccggtgctgacgggtaacgacttgatattagtgcaaggcgcaggaaatgttggcaaaattgcgcgttacttatctgaaatcaagctgaagccgcaaatccaggaggaagagcaacatggctgataaaatcgcggtcctgttgggcggaacctctgcggagcgggacgtttcgttaaattccggcgcggcagtgttggccgggctacgtgaaggcggcattaatgcgcatcccgtcgatccgcaagaggtcgatgtcgcgcagcttaaagcaatgggctttcagaaggtctttattgcgttgcatggccgtggcggtgaagatggcaccttacagggaatgcttgaactgctcggcctgccttataccggtagcggcgtgatggcctcggcgctttccatggataaactgcgcagtaaattgctgtggcagggcgcaggcttaccggttgcgccgtgggtcgcgctgacgcgcgctgagtttgaaaaaggtcttagcgaagaacaaaaagcgcgaatttcggcgctgggtttaccgctgatcgtcaaacccagccgtgaaggctccagcgtcggtatgacgaaagtagtagaagaaaatgctttacagggtgcgttatcattggcttttcagcatgatgacgaaatactgattgagaaatggctgtgcggtccggaatttacagtggcgatagttggcgaagaaattttaccgtcaattcgtatccaaccggcaggaaccttctatgattatgaggcgaagtatctctctgatgagactcagtatttctgccctgccggtttagatgcgtcccaggaagccgcgctacagtctctcgtcctgcaggcatggaaagctttaggctgcacgggatgggggcgtattgacgtcatgctggacagcgatggtcagttttatctgctggaagccaatacttctccggggatgaccagccatagtctggtgccgatggcggcgcgtcaggcgggaatgagcttctcgcagttagtggtacgaattctggagttggcggactgatatgtcgcaggctgcgctgaacacgcgaaacagtgatgaagagacgccttcttcacgccgcaataatggaacgcgtcttgcaggaattttattcctgctgacggtactgtgcaccgtgtttgttagcgggtgggtcgtgttagggtggatggaagatgcgcagcgtttaccgttatcaaagctggtattaaccggcgagcgtcactacacgcgtaacgatgatatccgtcaggcgatactggctctgggcgcgccgggaaccttcatgacgcaggatgtgaacattatccagagccagattgagcgtttgccgtggattaaacaggccagcgtcagaaaacagtggcctgatgaattgaagattcatctggttgaatatgtgccgattgcgcgttggaatgatcaacatatggtcgatgctgaagggaacaccttcagcgtgccgtcagaccgcatcggcaaacaggttttacccatgttgtatggcccggaaggcagcgcgagtgaagtgttgcagggataccgcgagatggggcaggtgctggctaaggataaattcactctaaaggaagcggcgatgaccgcacgtcgctcctggcaattgacgcttaataacggcattaagctcaatctcggcaggggcgatacgatgaaaaggttggctcgctttgtagaactctatccggttttacagcagcaggcgcaaaccgatggcaaacggattagctacgttgatttgcgttatgactcaggtgcggcagttggctgggcgccgctcccccctgaggaatctaatcagcaacagaatcaggcacaggcagaacaacaatgatcaaggcgacggacagaaaactggtagtaggactggagattggcaccgcgaaggttgccgctttagtaggggaagttctgcccgacggtatggtcaatatcattggcgtgggcagttgcccatcgcggggtatggataaaggcggggtgaatgaccttgagtcagtggtgaaatgcgttcagcgcgccattgaccaggcggaattgatggccgattgccagatctcctcggtatatctggcgctttccggcaaacatattagctgtcagaatgaaattggtatggtgcccatttccgaagaggaagtgacgcaagaagatgtggaaaacgtcgtgcatactgcgaagtcagtgcgcgtgcgcgatgaacatcgcgtgctgcatgtgattcctcaggagtacgccattgactaccaggaaggcattaaaaatccggtcggtctttccggcgtgcgtatgcaggcgaaagtacatttgattacctgccacaacgatatggcaaaaaacattgtcaaagctgttgaacgttgtggtctgaaagttgaccaactgatatttgccggactggcggccagttattccgtgttaacggaagatgaacgtgaactgggcgtctgtgtcgtggatatcggcggtggtacaatggatatcgccgtttatactggcggcgcgctgcgtcataccaaagtgatcccttacgcggggaacgtggtgaccagcgatatcgcttatgcctttggtacgccgccgagcgatgctgaagccattaaagttcgccacggttgcgcgctgggttccattgtcggtaaagacgagagcgttgaagtaccgagcgtaggcgggcgtccgccgcgcagcctgcaacgccagacgctggcggaagtgattgagccgcgttacaccgagctgctcaatctggtcaacgaagagatattgcaattacaggaacagcttcgccaacaaggggtaaaacatcacctggcggcggggattgtgttaaccggcggcgcggcgcaaatcgaagggcttgctgcttgcgctcagcgcgtgtttcatacgcaggtgcgtatcggcgcgccgctgaatatcaccggtctgacggattatgcccaggagccgtattactcaacggcggtgggattgcttcactacgggaaagagtcccacttaaacggtgaagcagaagtggaaaaacgtgttacggcatcagttggctcgtggatcaagcgacttaatagctggctgcgaaaagagttttaatttttatgaggccgccagatattacggcctcaggcgacaggcacatgacggagagagattatgtttgaacctatggaactaaccaacgacgcggtgattaaagtcatcggcgtcggtggtggcggcggtaacgctgttgaacacatggtgcgcgagcgcatcgaaggtgttgaattcttcgcggtgaataccgacgctcaggcgttgcgtaaaacggcggttggccagaccattcaaattggtagcggcattaccaaaggtctgggcgctggcgctaacccggaagtcggtcgtaacgcggcggacgaagaccgtgaagcgctgcgtgcggcgcttgaaggcgcagacatggtatttatcgcggcaggcatgggcggcggtaccggaaccggcgcggcgccagtggttgctgaagtggcaaaagatttaggtattctgaccgttgccgtggtgactaagcctttcaattttgaaggcaaaaagcgcatggcatttgcggagcagggtatcaccgagctgtccaagcatgtggactcgttgatcaccatcccgaacgacaagctgctgaaagtgctgggccgtggtatctccctgctcgacgcgttcggcgcggctaacgacgtgctgaaaggcgcggttcagggcatcgcagagctgatcacccgcccgggtctgatgaacgtcgactttgctgacgtgcgtaccgtgatgtctgaaatgggctacgcaatgatgggctccggcgtggcgagcggtgaagaccgtgcggaagaagcggctgaaatggctatttcttctccgctgctggaagatatcgacctgtccggcgcgcgcggcgtgttggtcaacattactgcgggcttcgacctgcgtctggatgagttcgaaaccgtcggtaacaccatccgtgcctttgcatcggataacgccaccgtggttatcggtacttctctggacccggatatgaacgacgaactgcgcgtgaccgttgttgccactggaattggtatggacaagcgtcctgaaatcactctggtcaccaataaacaggtgcagcagccggtgttggatcgttatcagcagcacggtatggcgccgctgacgcaggagcaaaaaacggtcgcgaaagtggttaacgacaatacaccacaggcggcgaaagagccggattatctggatatccccgcattcctgcgtaagcaagctgattaagaattagctggaatttgggattctgggctctttgtgctaaactggcccgccgaatgtatagtacacttcggttggataggtaatttggcgagattatacgatgatcaaacaaaggacacttaaacgtatcgttcaggcgactggcgtcggtttacacaccggcaaaaaagtcaccctgacattacgccctgcgccggccaataccggggtcatctatcgtcgcaccgacttgaatccaccggtagatttcccggccgatgccaaatctgtgcgtgataccatgctctgtacgtgtctggtgaatgagcatgatgtacggatttcaaccgttgagcacctgaatgctgctctggcgggcttaggtatcgataacatcgttattgaggttaatgccccggaaatcccgatcatggatggcagtgccgctccgtttgtctacctgctgcttgatgccggtattgatgaactgaactgcgccaaaaaattcgtacgcatcaaagagactgttcgggttgaagatggcgataaatgggctgaattcagaccgtacaatggttttacgttggatttcaccatcgactttaaccatccggcgatcgattccagcagccagcgctacgcgatgaacttctctgcggatgcgttcatgcgccagatcagccgtgcgcgtaccttcggttttatgcgtgatatcgaatatctgcagtcccgcggcctgtgcctgggcggcagcttcgattgtgccatcgttgttgacgattatcgcgtattgaacgaagacggcctgcgttttgaagatgaattcgttcgtcacaaaatgcttgacgcgatcggtgacttgttcatgtgtggtcacaatattattggtgcgtttaccgcgtataaatccggtcacgcattgaataataaattgttacaggcagtcctggcaaaacaggaagcctgggaatttgtgaccttccaggacgacgcagaactgccgttggctttcaaagcgccttcgacggtactggcataacgacatacgctgtcgtataaaattcgactggttaacctggcactctctccggccaggcgagccagtcgttttttttactatcctttatctgcgctttccttaatacagccattttgacagggttaaatggaaacacggcgcgttcgctgttttcttagccgattttcaccttagcttctcgtcattactgctgtagcgcgtacgctttaatgataagatttgtgcgcaaattgttttgattccgtaagcccatgaggggcatatcaggtggcaatgacgtgagtggaatactgacgcgctggcgacagttaggcagacgatacttctggccgcatctcttattagggatggtcgcggcgagttttggtttgcccgcgctcagtaacgccgctgaaaccaatacgcctgcaaggacgaccgccagcaccgcgtctaaagttaactttagccattttgcgctgttagaagcctctaaccgtcgtcccaatttcaccgtagattactggcatcagcacgctattcgcacggtgattcgccacctttcttttgcaatggcgccgcaaacgctgcccgttgccgacgcgccgtcgccattacaggcgcatcatatcgccttactgaatacgctcagcgcgatgctcacgcaggagggcacgccgccggcgattgttcgtcgcctctccctggcgtattttgcgccacaaaccgcatttagcatcccggcctggataagtcaggcgcagggtatccgcgccggtccgcaacgtctcagctaacgaaaaaagacccttttactttatttgtagctccgcggcgcggggcatttgagactttattatgctaatcaaattattaaccaaagtattcggtagccgtaacgatcgtacgctgcgtcgtatgcgtaaggccgtcagccttattaatgcgatggaaccggagatggaaaaactctccgatgacgaactgaaagcgaaaaccaacgaatttcgcgcccgtattgaaaaaggcgaaagcgtagagagcctgattccggaagcgttcgcggtggtgcgtgaagccagtaaacgcgtctttgggatgcgtcacttcgacgttcagctattgggtggtatggtgctcaacgatcgttgtatcgccgaaatgcgtactggtgaaggtaagacgctgaccgcaacgctgccagcctacctgaacgcgctgtccggcaaaggcgttcatgtggtaaccgtgaacgactatttggcgcagcgtgacgccgaaaacaaccgtccgctattcgaattcctcggtatgtccgttggtatcaacctgccaggtatgcctgcgccagccaaacgtgaagcttacgctgccgacatcacttacggcactaacaacgaatacggttttgactacctgcgcgacaacatggcgttcagcccggaagagcgcgtgcagcgtaaactgcattatgcgctggtggatgaggtcgactccatcctgatcgatgaagcgcgtacgccgctgatcatttccggcccggcggaagatagctcggaaatgtacaaaaaagtgaacaaaatcattccgcacctgattcgtcaggagaaagaagattctgacactttccagggcgaaggccacttctccgttgatgagaaagcgcgccaggttaacctgaccgaacgcggtctggtgctgattgaagagctactggtgcaagaaggcattatggatgagggcgagtcgctctactcgcctggcaatattatgctgatgcatcacgtcaccgccgcgctgcgcgcgcacgcgctgtttacccgtgacgtggattacattgtgaaagacggcgaagtcatcattgttgatgaacataccggtcgtaccatgcaggggcgtcgctggtctgacggtctgcaccaggcggtagaagcgaaagaaggcgttgaaattcagaatgaaaaccagacgctggcgtctatcaccttccagaactacttccgtctgtatgaaaagctggccggtatgaccggtacggcggatactgaagccttcgaatttagctctatctataagctggacaccgtcgttgttccgaccaaccgtccgatgatccgtaaagatttgccggatctggtctacatgaccgaagcggaaaaaatccaggccattatcgaagatattaaagaacgtaccgcgaacggtcagccagtgctggtcgggacgatttctatcgagaaatctgaagtggtctccagagagctgaccaaagcgggcatcaaacataacgtactgaacgcaaaattccacgccaacgaagcaggcatcgttgcgcaggctggttatccagcggcggtcactatcgctaccaacatggcgggtcgtggtactgatattatgctgggcggtagctggcaggcggaagtcgccgcgctggaagcgccgacggaagaacagattgcgcagattaaagcggactggcaggtacgccatgacgcggttctggctgccggcggtctgcatatcattggcaccgagcgccatgaatcccgccgtatcgacaaccagctgcgtggccgttccggtcgccagggcgatccgggttcttcccgtttctacctgtcgatggaagatgcgctgatgcgtattttcgcctccgatcgtgtctccggtatgatgcgtaaactgggaatgaagccgggcgaagcgattgagcacccgtgggtgacgaaagctatcgctaacgcgcagcgtaaagtagaaagccgtaacttcgatattcgtaagcaactgctggaatatgatgatgtggcgaacgatcagcgccgtgcaatttatacccagcgtaacgaactgctggatgtgtctgacgtgagcgacaccattaacagcattcgcgaagatgtctttaaggcgactatcgacgcctacattccgccgcagtcgctggaagagatgtgggacatcccgggtttgcaggaacgcctgaaaaacgacttcgacctggagatgccgattgccgaatggctggataaagagccggagctgcatgaggagacgctgcgtgagcgcatcctggcgcagtccatcgaggtgtatcagcgtaaagaagaggtggttggcgctgaaatgatgcgtcatttcgaaaaaggcgtgatgctgcaaacgctcgattccctgtggaaagagcatctggcggcgatggattacctgcgtcagggtattcatctgcgtggctatgcgcaaaaagatccgaagcaggaatacaagcgcgaatccttcgctatgttcgccgcgatgctggaatcgctgaaatatgaagtaatcagtaccctgagcaaagtccaggtacgtatgccggaagaggtcgaagcgatggaaatgcagcgtcgcgaagaggcggagcgcctggcgcagatgcagcagctaagccatcaggatgacgatgccgccgtggctgccgatctggccgcccaaaccggcgaacgtaagattggacgtaacgatccttgcccttgcggttctggtaagaaatacaaacagtgtcacggtcgcctgagctaatgcgataaacttaccggcctgataagacataatgtgttgccatcaggtcagtactggcattattgccgaagggcgctacgcttattcggcctggcattgaacacagataaaaaggcgcaggcgactgcgccttttttatggatgcaacaagatgaaaaaactgcaaatcgcggttgggattatccgcaacccgaacgacgaaatttttattacccaacgcgccgctgatgcgcatatggcgaacaagctggaatttcccggcggaaaaattgaagccggcgaaacaccagagcaggcgttgatccgggagctacaggaagaggtggggattacgccaacacaggtgacactattcgacactctggaatatcaattcccggatagacacattacgctgtggttttggctggttgaacgctgggagggcgaaccgtgggggaaagaaggacagccgggacggtggatcgcgcagaacgcgttgagtacggacgattttccgccggccaatgaaccgattattcgtaaattacgccaatttgcgctttagtgggggatcgcaacacgatccccatcgatcttattagcgatttaatgtcgacataatttccggccagtagcgggggccggccgcggcgtcgtgaggaaaaaccgcctcaattgccgtcagctcctgcgggcttagggtcagtgataacgcgccgaggttttcatccaccctggcgcagtggcggctacgtttctgttatagcctaatctcgccggtttatttgtattatcccggccgcgcgcatatggcaccaaaactacgcgtatttattgattatttttgtcataaggcgatattgccgtctcaacagagccatcaccgttagcgctcttcgctccagtcgtcgctatcagactgatcgccgctgctggcgattcgtttctcttcggcggcccattcgcccaaatcaattaactgacagcgtttagaacaaaatgggcggaaggggctaatttccccccagacgaccggtttaccgcaggtcggacagtttacgacggtcacgtcagacatttttactccttagcaacaggccagttcaaaatcaagacgctccggcaccagaccattttcactatccagcggcataaagcgaatggcaaaacggctcttatggccggaaatttgcggataaagttgtgaatcgagcgtcagcataagacgcagcaaatcggcgtcgtccccgttatcctgataaaaaccgttcaggctggtttgcttacggaaaggcgctgaattacggatcagatcaagcaccagcgtcagcgcctgggtgaggggattcaggctggcaagccagctttcaatctgggcatcgcgctgcgcctgttgtaggtgcaaccagatatgcagagtgggtaaatcgaaactgcaacagccgccaggaatacttaagcgttgacgcacaagagcaatcaagcgatcttcgcgtagctgctggccaatcctcggggcggagatcagcacgctgcccgccgattttaactgctggcgcagggcttcaatacggtcttgatcgacgccgggaacctcaacccaggcctgtaatttacgctgctggcgctccagttctttcagcagttcggtacggacttcgccccgttcgaacacatccagtagatcgctgatattacggaaaaaatgcagtgcgccagcatggtctgcaattggcaggttgatggagagctgttggatcaaaaactctatgcgcagccacgtacgcatcttctcattgagagggtgttcaaataggacctgggtgtgcattacggtttttcctgtgagacaaactgcgacgcgagcttaagataactggcgtgcaggcgggccacatctgatgcgatagcatccggtgcgccgttattatcaataacatcgtccgccacggcaaggcgcgcttcacgcgtcgcctgcgcagcgagaatgtgttcaacatgctcgcgcgtaacatcatcacgctgcattgtgcgtatgagctgcgtttcgggcgtcacgtcaaccaccagtacgcggttggctttttgatacagcctgttttcaaccagcagaggcacaacccataacacatagggcgacgtagcctgctgaaactgtcgttgggtttcctgctgaattaagggatgaagcagagcgttaagccaggctttttcttccggatgcgaaaaaatacgctcacgcagcgcccggcgacgtaacgtgccgtcggcggcgataagttcagaaccaaaatgttccgctattgcgttcagggcgggctgccctggctcaaccatctggcgcgcgataatatccgcgtcgatgacggttattccgaggtcagcgaaggcatcagcgacggtacttttaccgctgccaataccgccggttaaggctacggtatacctcatatctccagcttccggaattttagtttgataatcaaaaggttaaattttaaacatacaaagacgatacgctctgagcattaacctactattcgccaggtaaatttatgggattgtaacgtaaaaaaagagaatttcgcagtcttgtacggccatgattagtgcgtatgatagcgtcactggagttgtgagtttcgatttttcgccattaaccccaggaatccgtacatgcgtattgaagaagatctgaagttaggtttcaaagacgttcttatccgtcctaagcgttctaccctcaaaagccgttccgatgtcgaactggaacgtcaattcacctttaaacactcaggtcagacctggtctggcgtaccgattatcgcggccaatatggataccgtcgggacgtttgaaatggcgcaagcattggccgggtttgatattctgactgctgtacataaacattataccgttgaagaatgggcagcttttatcaacacggcctcggctgatgttctgaagcatgtgatggtttccaccgggacctctgatgctgatttcgaaaaaaccgtgcagattctggcgctgaatcctgcgctgaactttgtctgtattgatgtggccaatggctattcagaacattttgtgcagttcgtcgcaaaagcgcgtgaagcatggccgacaaaaacaatctgcgcaggcaatgtggtaacgggcgagatgtgcgaagagcttatcctctccggcgccgatatcgtgaaagtgggaattggtcccggctccgtatgcacgacgcgtgtaaaaaccggcgttggttatccgcaactgtcggcggttatcgaatgtgctgacgcggcgcatggcctgggcggtatgatcgtcagcgatggcggctgcaccatgccaggcgacgtagcaaaagcctttggcggcggcgcggatttcgttatgttgggcggcatgctggcggggcacgaagagagcggcggcagcgtggtagaagagaacggcgagaaatttatgctgttctacggcatgagttcggaatctgcgatgaaccgtcatgtcggcggcgttgcgaaataccgcgcggcagaaggtaaaacggttaaattgccgctgcgtgggccggtgggcaatactgcccgcgatatcctgggcggtctacgctcagcctgcacttatgtcggcgcgtctcgcctgaaagagttgaccaaacgcaccacctttattcgggtgcaggaacaagaaaaccgcattttcaatagcctctaatattctggctggcgtaaatgtgcgccagccttatcccatcccgctcatcgcgtctcccagatgaaaaatcggcaaatacatcgccactaccagcgtaccgataattaagccggtgatgatcaataacgccggttccaacagcgacgccagattatcggccagcgccagcgtagtttcactgtggtgacgggcaaggttatgcagcatgatatcgagtgaaccggacgcttcgcccgttctgaccagttgcaggcatagcggactaaattcctgggtattttttagcgccaaccagaccggattgcccgcggcgatctcctgatgtacctgcgttaaacgctgtgaccagtaagggcagccgagactatcgatagcgctttccagtccctgaagaaaaggaatacctgcgctttgggttaatgccagtacggtgaatatttgcgctagtttctggcctcttatcaggcgacccataacgggaagccgtagcagaagacgctgccgctgcgcttgccaggacggcttttgttttaccctgcggtgagcgatagcaacgagcatcgtcaggaacaagatgagccaaccccatgccgacccccattgcgctatcgcaataataccgcgtgtcagaagaggaagcggggtattgaagctacggtaaatggcggcaaattccggcaggacaaagtgcagcatggcgaaaacgaccagggcggccattgttagaataatggcgggatagcgcagcgcctttttcacgctaaccgtaatctgccgttgcgctttttgctgacgggccagttcaaagcagcattcggccagtttgccggtcagttctccggtgcggatcatcgtctggtagagcggcggaaatacctgcggccaggagactaatgcgctggaaaaagggacgccctgttcaagctcgtgagccagcgtgcgcaacagcgcttgccattgtcggtggggatgctgtttcgcaaggagttccagcccttctgaaagcgtcagcccggcatgaatgagcgtggccaactgatgaataatttcagcgctttgctcttctttccacagtgcggcgttaacgcccatgcgcttgatgcgaagcggcataatgcgctgatgttgcagggtgatgatcagcgccagacgattgtccgcccatacaacgtcttgttccagttgacctttatcgttaacgccttgccagcgccagagctgtttaacgctcatggggcattcccagaacgcgcagtatctcttcaaaggacgtcatgccttgctcaacggcgcgacagccattttcaaaaagcgtccctgtaccggtctgttggaggtgggcttccagtgcttgcgccgatgcgccgctcgcaattaactgacgtaatgccggggtaacggttaacacttcgaataacgcggttcggccataaaagccgtggtagcaatgctgacagccgcttgcctgccagcgcggtatcgcgctgggccaaagattgggcgatagcaccacgggatcgctcagacgctgtttgcagtgcgggcaaagcttccttaccaggcgttgcgctaccaccagcgtaagcgccgatgagatcatccagcgtgctacgcccatttgctgcaaacgtatcagggtttcgctggtggagttcgtatggagcgttgaaagtaccagatggcccgtttgtgccgccttaatggcgatttctgcggtgtcgccgtcacgaatttcacctaccatgatgatgtcagggtcctggcgtaaaagcgcgcgcagcacattttgaaaggtgagcccggcgcggggatggatctgcgtctggttaatcccatccagtggaatttctatcggatcctcaacgctacagaggttgatacccggcgtattccgggtttgtagcgcgctgtatagcgtgaccgtttttccgctaccggtggggccagtcaccagtaccagcccctgaggttgctgtagggcttgtctaaaagcggtaagttgtgccccgtacatgcccagcgtgtccagatccagcgtttgttcaacctgatgcaacaaccgtaagacgactttttcgccttctttacagggaagcgtggcgatacgaaaagagatgctgtcgcccgccaggtcaacggtaaattgcccgtcctgcggcagtcgatgttcagcgatgtccaaatttcccaggactttcaatctggccgtcagcgcaagccccgtctctttggcgatgtcctgcagaatatgaagaacgccgtcgatgcggagtcttattcggtagcggctggcgccgggttcgagatggatatcagaggcgcgtttcgccatcgccgagcgtaatgtctgattgagaagctgggctgcggtttctccgcctttcgcggcgtttgccgagggtgcctgatccggcttatgccgatgattttccatttgctggcgagtccagcacacaatatcaatctgtttttgcgtggcgaaatgcagagcgtccagtaacgcatgagagggcgcgtcgaccaccgcaacagtgatactgttgctggcgctattgatcagtacagcctgatgacgttgacacaaggtgttgagctgagcgtctttcatcttgtctccttagttggcgtcaaaacggaagacatcttcacaagcctgttgtaacgcgctgtcgctttgaatattgcagttacgcgtccagccagtaatgccgttagcattgtcccaggcgggcgtcatgatgacgctaagcccgctcagactctcctggccggtaagcgtgatgacgcctttttccacgctcatgcccgaaacataacgggtgatgacgggcgaggggataccgttgacgcccgcatcgcatgtgctcgtcccaccatgttccagagcgcagagttcgacggcagtacggtaggggacaaacgtttgcaacatatccgtcagcgccgctttacgcagatagttctggtaagccggaatgccaatggcgcttaaaatggcgatgatgccaataacgaccatcagttcgataagcgtgaaaccgcgttgtttttccattgttcgctccttgagttagctggcgctactgtggcaaacgcgggaagagcgggcgagcggcaaaaggtaaaacgggaaggcggattctgaagattttcgctgcgttacatgacacggcaacgttattgcgaggcgctacgaatattttaccgaataatgacgcggatctacggacaggtgatttatagacccgacggcgcagcgccatcgggtggagaggatcagcaaaaacgcatggagagatcgagcgcgcgcacgtgcttggtcagcgcgccaacggagatgaaatccaccccggtttcagcaaattcgcgtaaggtttccgcggtgacgttgccggatacttccagccgcgcctggccgttgacgcgtttcaccgcctcgcgcatctggtcggtgttgaaattatccagcatgataatatccgcgcctgctttcagcgcatcgtccagttcatccagattttcgacctcgacttctaccggcacgtccggatgtagccagaacgctttttccaccgcctgacgaaccgaaccggaggcgataatatggttttctttaatcaggaacgcgtcagtgaggcccagacgatgattggcgccgccgccgcataaaaccgcatatttgagcgcggtgcgcagacccggcagcgttttacgcgtgtcgagcaactgggtttgggtgccagccaacagtccaacgtagcggcgtacttcactggcgacgccggaaagggtctggacaaagtttagcgccgtgcgctcgccggtcagcaatacgcgagccgggccgttcagttcaaacactgtttggttggcgtgaatggcgtcgccgtcatcgacatgccaggtgaggcgcacatcatcgcccgccagttggatgaagacctcttcaacccagcgcttgccgcagaaaacgccgtcttcacgagtgatcaccgtggcatgggcttgcgtatctgccggcaaaagttgcgcggtgatatcgttgccagcatcgacttctccacctaaatcttcacgcagcgcctgagcaacggcggcagggatatcgagattaatgcgttccagtagcgcgtcacgtcggtcgtctgggttataacggcgaggcggcatgataaaactccaaattgctaacgaatcataaggtagaaacatgctactctgaagcagctataagcaccactcaaaaggagactccgcatgttgccagataagggttggttggtagaggcgcgacgcgtcccttctccgcattatgattgccgtccggatgacgaaaaaccgtccttgctggtggtgcataatattagcctgccccccggcgagtttggcggtccgtggatcgatgcattattcaccggaacgatagatccagacgcccatcctttttttgcagaaatcgctcatcttcgtgtttcggcccattgtctgattcgtcgcgacggtgaaatcgtccagtatgtgccttttgataagcgtgcgtggcatgcgggcgtgtcaaactatcaggggcgggaacgttgtaatgatttctccattggtattgagctggaggggacggatacgctggcttataccgatgcgcagtatcagcagctagccgccgtgacgcgcacgcttatcgctagctatccggcgatcgccgacaatatgaccggacactgcaacattgcgcctgaccgcaaaacggaccctggccctgcctttgactggccgcgctttcgcgctttggtagccctctcgtcgcacaaggagatgacatgacgctgtttacgacattactggtgctgattgtcgagcgcctgtttaagctgggcgagcactggcagctcgatcatcggctggaggcgctattccgtcggattacgcatttttcgatgttgcgcacgatgggaatgacggcgatcgcgatggtggtgacttttctactgctccaggcgttaaaagggctgctatttaacgtgccgacgctggtggtgtggattctcctgggcgtgctgtgtatcggcgcgggcaaagtgcgagtacattatcacgcctggctgaaagcggcgtcccgtaacgatccgcatccttgcgaggcgatggccagcgagcttacgctgattcacggcgtgccgccggattgtaatgagcgtgaatttttgcgtgagctgcaaaatgcgttgttatggataaatttccgtttttacctcgcaccgctattttggtttatcgttggcggtccgtgggggccggtaacgctggtgggctatgcgtttttacgggcctggcagacctggctggcgcgctatcagacgccgcaccaacgtttgcaatccggcattgacgctattcttcatgtgctggactggattccggtacgtctggcgggcgtagtgtatgcattactggggcatggcgagaaagcgttgccggcctggtttgcctcgctggcggatctgcatacttcgcaatatcaggtgctcacacgtctggcgcagttctcactggcgcgcgaaccgcatactgacaaagtagaaacccccaaagcggcggtgtcgatggcgaagaaggcctcgtttgtggtggtggtgattattgcgttgctcaccatttatggggcattagtgtagcgttgtgccgatggcgctaacgcttatgctgcctacaatggaaaaatctgtaggcccggtaagcgttagcgccaccgggcagtgcaacggcttagatcgtatcggctggcggcacgccaaaatcaggcatcccgttttcgtcccagcgcacccgtttcagacgcgtatggcggttgggatcgtacaacggatcgccttcaatttcggtgtaatttctcgcgtggtacaccagtacattttcaccttccggcgtttgcgtaaagctgttgtgtcccggtccatactggcgattctcatagctggtggtaaagaccgggcgcggtgatttatgccagttggccggatcgcgcggatcgtcgtttacgttaatccacagtaatcccatacagtagttttcatcggtggcgctggccgaatagctgataaacagcttgtcgccatgcaccacgacggccggaccttcgttaacccaaaaaccccgacactcccagtcgtactctggcttactgagtcttaccggctcgcctttaatcgtccacggattttccagttcagccagataaatatttgagttaccggcaatatccggcgctttttgcgcccacagataccactgctttccctgatgataaaaagtggtggcatcgagggcgaaggtatcaaacggtgttttaatttgacctttctccgtccacttgccggtgagtgggtcggcatcggcgcactccagggcaaacatgcgatgctggaacattcccagcttatcaagcgcttgagtatgggtagcggcaaaatagatgtaccacttgccgttgatgcggtgcatttccggtgcccagatgagctggctcatcgggccgctttccggtttacgccagacgacaacggggtcggcggcgcgcaacccttccagcgaattagcccggcggatttccagcctgtcatattccggtacggaggcaataaagtagtaatcgctgccgtcgcgtaaaataaacggatcggcacgttgttcaataaacgggtttggccagtttgccatcaggctttccttacgctttcagcggcgttgagctcctgcaactcactcaattcgcggtaattagtgcgacgtttttccaaatcgtcctggatttttttcatcagttcacggtcaactttcagcagacgtaccacgcctgcggtaatcagatagccaacgccggggataacggtaaacaacagcataataccgttcatcgccgaggcgctttgcgctttggcgctggcgtcataaccgtaccaggagagcaaaaagccgaccatcgccccggcaatcgccaggcccagtttcaggaagaacaggttaccggagaagctgataccggtaatgcgtttgccggttttccattcgccgtaatcatcgacgtccgccatcagcgaccagtgcagcggggaagggatctgatgcagaatattgagcaggaagtagagcgccactatcatcacggtggctttcggatcaaagaaatagaacgcgcaggagaaaatcgccagcgcaatattggtccagaaaaataccttcaatttacaccagcgatcggttaagacttttgccagcatactgccgatcatcataccgaccacgccaagactaataaaaagcgtagcgaaatgggtgctttgtcccatcacccaggtgacgtaatacatggtcgccgccatacggataaaccccgggcagacgttacataaggtcaatagcagaatgcgtacccattgatcgtttttccacacatctttgaaatcattcttcatatcatcgtgcgtcggaatggcagggcggacgcgttcgcggacgctggcaaagcagaacagaaacatacccatgccgataatcgccagcacggtcatcgccaactgatagcctttggctttgtcgccgccgccaaaccagtccaccatcggcaatagcgttaacgatagcaacagcgtcgcgatgccgactaatacgaagcgataagcctgacaggccacgcgctcttttggatcgttagtgatcacgccgcccagtgagcaatagggaatattgatggcggtgtaggtcacggaaagcagaaaataggtgacgaaagcatagacaactttgctgttatagccccagtccggcgtcgtgaacatcagaacgctgaacagcgcgtagggaaatgcaatccacagtagccaggggcggaaacgaccatatttactttgggtacgatcggcaagcgcgcccatcaccggatcggtaacggcatcgataacgcgtactgaaaggagtaaaacaccgactaacgccggggcaagaccaaaaatatccgtataaaagtaattaacaaacagcatgatagcgccaaaaataatgttacatccggcgtcacccatgccatacccgattttctctcttaccgaaagtctgcccttatccattgagacttctccccatcagatgatggcggtaattattcgcctgcgagcttttttttgcgtagcaggatcacgccgctgatatggataaaatggttatacgtgggaaactgtgaggcagataacaccctccccggacggggagggcggaaaagtaacgccacgatcagtgggctttcaccgtttttgccgttttttctttacacaggtagccgacgcccaggatgagcagccataccggaatcagccacacggagatcgccatacctggcgtcatcagcataatgatcaataccgccgccataaacagcaggcagagaacattgccgaacggataaaacagggccgggaagcgggttttcacgccctgctgctgtttcgcgcgacggaacatcatatgggcaaggctaatcatcgcccagttaatgaccagcgcggagaccaccagcgccatcagcagtccgaatgcggactctggggccaggtagttgagcagcacgcacaacgcagtcacgacggcggaaaccaaaatggagctcaccggcacgccgcgtttgtcgacgttcagcagcgctttcggcgcatttccctgctgggccagaccgaacagcatacggctgttgcagtaaacgcagctgttataaaccgatagcgcggcggtgagaaccacgatattcagcgcattggcgacaaacgtatcgcccagctcatggaagataaggacaaatgggctggtatcggcggtgacgcgagtccatggcagcagcgaaagcagaaccgccagcgagccgatataaaaaatcaggatgcgatagataacctgattagtggctttggggatgctctgttccgggttatcggcttcagcggcggtgatccctaccagctccagtccgccgaacgaaaacataataatggccatcatcatcaccagcccggtccagccatgcggcagaaagccgccctgttcccacaggttgcgcacggtggcctgcggaccagcggtatcgctgaagagtaaccacgcgccgaacagaatcatagcgatgacggcgatcactttaataatggcgaaccaaaactccatctcaccgaacactttaacgttggtcaggttgatggcgttgataatcacaaagaaggctgccgcagaagcccaggtggggatctccggataccagaactggatatatttacccactgcggtcagttccgccatggcaactaatacgtacagcacccagtagttccagccggaagcgaatccggcaaagccgccccagtatttataggcgaagtggctaaaagagccggcgaccggttcttcaaccaccatctcccccagctggcgcataatcagaaaggcaataaagcctgcaatcgcatagcccaggataattcctggccccgccgactgaataacggaggcgcttcccaggaacaagcctgtccctatcgcgccgcccaatgcgataagctgaatatggcggtttttcaggccgcgcttgagctgctcgccgtgctgctgactgtccatcataaaacctcgtgtatcgggcgcggtttattcataacgcgcttattttgaacgatgcagtagtgcgtgtgtaagtttgcaattccgctttttgtattgatttatttacaagctcgttttttaaaatgtcacttcaactctttcgtcttgatcagaataatggtatgtggccgcgaatgcacctgctttgtgcaggggtgatgacgagttgcgtaaaaagaaagcacttgtaaatacctccttttattttcccttacagatgttaatttgtttttattcattatttatgcataaaaatgcatttaatctactgttgaatcggttcagatgagattttttatcgtttcaaatacgttaaatctacctcctggtgggtaaatttaacatttgtgcacagttacagttttgaaacatgatttctgtaaaattgttaaaatgtgcctcctttactgatttcaatcaaaacctgtatggacagaaggtgaatactttgttactttagcgtcacagacatgaaattggtaagaccaattgactccgggcaaatggcttaagacaggaaatcatggcctacagcaaaatccgccaaccaaaactctccgatgtgatcgagcagcagctggagtttttaatccttgagggaacattgcgtcccggagaaaaactcccaccggaacgtgaactggcaaaacagttcgacgtctcccgtccctccttgcgcgaggcgattcaacgtctcgaagcgaagggattgttgcttcgtcgtcagggcggcggaaccttcgtgcagagcagcctgtggcagagctttagcgacccgctggtggaactgctctccgatcaccctgaatcccagtttgacctgctcgaaacgcgccatgcgctggaaggcattgcggcttattacgcggcgctgcgcagcaccgacgaagataaagaccgtattcgcgagctgcaccatgctattgagctggcgcaagagtccggcgatctggatgccgagtccgaagccgtgctccagtatcaaatcgccgtcaccgaagcggcgcacaacgtggtattgcttcatctgctaaggtgtatggagccgatgctggcgcaaaacgtgcggcagaacttcgaattgctgtatgcgcgtcgggagatgctgccgctggtgagtacgcatcgcacccgtatatttgaagccattatggccggaaaaccagaagaagcgcgtgaagcgtcacaccgacatctggcgtttatcgaagagattatgctggacagaagccgtgaggagagccgtcgtgaacgcgctttacgccgcctggaacagcgcaagaattagttttttctggcagaacgttaaccagaagatgttgtgaataacgcgcaaaaatgtgcgcggcaactaaacgcagaacctgtcttattaagctttctcacgaaagtttaatgggacaggttccagataactcaacgtattagatagataaggaatacccccatgtcagaacgtttccaaaatgacgtggatccgatcgaaactcgcgactggctacaggcgatcgaatcggtcatccgtgaagaaggtgttgagcgcgctcagtatctgattgaccaactgctttctgaagctcgtaaaggcggcgtgaaagtcgcggcaggcgcaggggccagtaattacatcaacactattgccgttgaagacgaaccggaatacccgggtaatctggagctggaacgtcgcattcgttctgcgatccgctggaacgccatcatgaccgtgctgcgcgcgtctaaaaaagaccttgagttgggcggccacatggcgtccttccagtcttccgccacgatctatgatgtctgttttaaccatttcttccgtgcgcgcaacgaacaggatggcggcgacctggtgtacttccagggccacatctctccgggcatctacgctcgcgcgttcctggaaggtcgtctgacccaggaacagatggataacttccgtcaggaagttcacggcaatggcctctcttcctatccgcacccgaaactgatgccggaattctggcagttcccgaccgtctctatgggtctgggcccaatcggtgctatctaccaggcgaaattcctgaaatatctggaacaccgcggcctgaaagatacctctaaacaaaccgtttacgccttcctcggcgacggcgagatggatgagccggaatccaaaggcgcgatcaccatcgccacccgtgaaaaactggacaacctggtctttgttatcaactgtaacctgcagcgtcttgacggcccggtcaccggtaacggcaagattgttaacgaactggaaggcatctttgcaggtgctggctggaacgttatcaaagtcatgtggggcggtcgttgggatgaactgctgcgtaaagacaccagcggtaagcttatccagctgatgaacgaaaccgttgacggcgactaccagaccttcaaatccaaagacggcgcttacgtgcgtgagcacttcttcggtaaatacccggaaaccgcagccctggtggccgactggaccgatgagcagatttgggcgctgaaccgcggtggtcacgatccgaagaaagtctatgctgcactgaaaaaagcgcaggaaaccaaaggcaaagcgaccgtaatcctggcccataccattaaaggttacggcatgggcgacaccgcggaaggcaaaaacatcgctcaccaggtgaagaaaatgaacatggacggcgtgcgttacgtccgcgatcgtttcaacgtgccggttgccgatgctgatctcgaaaaactgccgtacattaccttcccggaaggttctgaagaacacaaatacctgcatgaacgccgtcaggcgctgcatggctacctgccaagccgtcagccgaacttcaccgagaagttagagctgcctcaactttcagatttcggcgcgctgctggaagagcaaagtaaagagatttccactacgatcgctttcgtgcgtgccctgaacgtgatgctgaagaacaagtcgatcaaagatcgtctggttccgatcatcgccgacgaagcgcgtactttcggtatggaaggtctgttccgtcagattggtatctacagcccgaacggccagcagtacaccccgcaggaccgtgagcaggttgcttactacaaagaagacgagaaaggccagattctgcaggaaggtatcaacgagctgggcgcaggcgcatcctggctggctgcggcgacctcttacagcaccaacgatctgccgatgatcccgttctacatctactactctatgttcgggttccagcgtatcggcgacctgtgctggcaggctggcgaccagcaggctcgcggcttcctgatcggcgggacttccggtcgtactacgctgaacggcgaaggtctgcagcacgaagatggtcacagccacattcagtcgctgactatcccgaactgtatctcttacgacccggcttacgcttacgaagtggctgtcatcatgcatgatggtctggagcgtatgtacggtgagaaacaagagaacgtttactactacatcaccacgctgaacgaaaactaccacatgccggccatgccagcaggtgccgaggaaggtatccgtaaaggtatctacaaactcgaaaccctcgaaggtagcaaaggtaaagttcagctgctgggctccggttctatcctgcgtcacgtgcgtgaagcagcacagatcctggcgaaagattacggcgtaggttctgacgtatatagcgtgacctccttcaccgaactggcgcgtgatggtcaggattgtgaacgctggaacatgctgcacccgctggaaaccccgcgcgttccgtacatcgctcaggtgatgaacgacgctccggctgtagcatctactgactatatgaaactgttcgccgagcaggttcgtacttacgtaccggctgacgactatcgcgtactgggtacggatggcttcggccgttccgacagccgtgagaacctgcgtcaccacttcgaagttgatgcttcttatgtggttgttgcagcgctgggcgaactggctaaacgtggcgaaatcgacaagaaagtggtagcggatgcgattaccaaattcaacatcgatgcagataaagttaacccgcgtctggcgtaagaggtaaaagaataatggctatcgaaatcaaagtaccggacatcgggacagatgaagttgaaatcaccgagattctggtcaaagtgggcgacaaagtggaagctgaacagtcgctgatcaccgtagaaggcgacaaagcctctatggaagtcccgtctccgcaggctggcgtcgtgaaagagatcaaagtctctgtcggcgacaaaaccgagaccggtgcacttatcatgattttcgattccgccgaaggtgcagccgacgctgcacctgctaaggcagaagagaagaaagaagcggcgccggcagcagcacctgctgcggcagcggcgaaagacgttcacgttccggatatcggcagtgacgaagttgaagtgactgaagtgatggtgaaagtgggcgacaccgtagaagctgaacagtcgctgatcaccgtcgaaggcgacaaggcctctatggaagttcctgctccgtttgcaggcaccgtgaaagagatcaaagtgaacaccggtgataaagtctctaccggctctctgattatggtcttcgaagtggcgggtgaagcaggcgcagcagcaccagcgaaagcggaagccgctccggctgcggctgctccagcagcagcgacgggcgtgaaagacgttaacgtaccggacatcggcggcgacgaagttgaagtcaccgaagtgatggtcaaagtcggcgataaagttaccgctgaacagtcgctgatcaccgtagaaggcgacaaagcctctatggaagttccggctccgttcgcgggtaccgtgaaagaaatcaagatcagcaccggcgataaagtgaaaaccggttctctgattatggtcttcgaagtagaaggcgcagcgcctgcggccgctccggctaaacaggaagcggcggcgccggctccggcggcgaaagctgagaagcctgctgccccggctgcaaaagcggaaggcaaatctgagttcgctgaaaacgacgcgtacgttcacgctactccgctgattcgccgtctggcgcgcgagtttggcgtcaacctggcgaaagtgaaaggcaccggtcgtaaaggccgtattctgcgcgaagacgttcaggcttacgtgaaagacgctatcaaacgcgcggaagctgcgccggctgctgcgggcggcggtatcccgggtatgctgccgtggccgaaagtggacttcagcaagtttggtgaagttgaagaagtggaactgggccgtatccagaaaatctctggcgcgaacctgagccgtaactgggtgatgatcccgcacgttacgcacttcgacaaaaccgatatcaccgatctggaagcgttccgtaaacagcagaacgccgaagctgagaagcgcaaactggatgtgaaatacacgccagtggtcttcatcatgaaagcggttgccgctgctctggaacagatgccgcgcttcaacagctctctgtccgaagacggtcagcgtctgaccctgaagaaatacatcaacatcggcgtggcggttgataccccgaatggcctggtggttccggtctttaaagacgtgaataagaagagcgtgaccgagctgtctcgtgaactgaccaccatctccaaaaaagcgcgtgatggtaagctgaccgctggcgaaatgcagggtggttgcttcactatctccagcatcggcggcctgggaactacccacttcgcgccgattgttaacgcgccggaagtggctatcctcggcgtttctaagtcggcgatggaaccggtgtggaatgggaaagagtttgtgccgcgtctgatgatgcctatctctctttccttcgaccaccgtgtgatcgatggtgctgatggtgcgcgtttcattaccattatcaacaatatgttgtctgacattcgccgtctggtgatgtaagcgaaaagccggcccgacggccggctttttttgataatctcatggagtttgtgaggttattagcgaaagcgataattcgtgatccgtttgttgtttcaaaattgttaacaattttgtaagatacgggcggatagaacgacccggtggatgatgggcgatcaagtaccccggaccgccggatacaaataaagaggtcatgatgagtactgaaatcaaaactcaggtcgtggtacttggggcgggcccggcaggctattctgccgctttccgttgcgctgatttaggtctggaaaccgtaattgtagaacgctacaacacccttggcggtgtttgtctgaacgtcggctgtatcccttctaaagcgctgctgcacgtagcaaaagttatcgaagaagccaaagcgctggctgaacacggtatcgtcttcggtgagccgaaaaccgatatcgacaagattcgtacctggaaagagaaagtgatcacgcagctgaccggcggtctggcgggtatggccaaaggccgtaaagtgaaagtggtcaacggtctgggtaaattcaccggggcgaacaccctggaagtggaaggcgaaaacggcaaaaccgtgatcaacttcgacaacgcgatcatcgcggcaggttctcgtccgatccaattaccgtttattccgcatgaagacccgcgcgtatgggattctaccgacgctctggaactgaaagaagtgccgaagcgtatgctggtcatgggcggcggtatcatcggtctggaaatgggtaccgtataccacgcgctgggttcagagattgacgtggttgaaatgttcgaccaggttatcccggcggctgataaagacatcgttaaagtcttcaccaagcgcatcagcaagaaattcaacctgatgctggaaaccaaagtgactgccgttgaagcgaaagaagacggtatctacgtttcgatggaaggcaaaaaagccccggctgaagcgcagcgttatgatgcggttctggtggcgattggtcgtgtgccgaacggtaaaaacctcgacgcgggcaaagctggcgtggaagttgacgaccgtggctttatccgcgtggacaaacagctgcgcaccaacgtgccgcacatcttcgctatcggcgatatcgtcggtcagccgatgctggcgcataaaggcgttcacgaaggccacgttgccgctgaagttatcgccgggaagaaacactacttcgatccgaaagttatcccgtctatcgcgtacaccgagccagaagtggcatgggttggcctgaccgagaaagaagcgaaagaaaaaggcatcagctatgaaaccgccaccttcccgtgggcagcttctggccgtgctatcgcttctgactgtgcagacggtatgaccaaactgattttcgacaaagaatctcaccgcgtgatcggcggggcgattgtcggtaccaacggcggcgagctgctgggtgaaatcggtctggcgatcgaaatgggctgtgacgcggaagacatcgcgctgaccattcatgcgcacccgactctgcacgagtccgtcggtctggctgctgaagtgttcgaaggtagtattaccgacctgccgaacccgaaagcgaagaagaaataatcttctgtaggtggcaatgcgccacccgatacaaaaaagcggctttacagccgctttttttatgcatggcaaatcagatgtgtcaaatgatggcgaaggataacgaaaccgcaaaatttatcgtttccgcagcagtacgtttttcaaagcttatgccgtcggtagtgcctttgtctgtcattttcgaccaactaattgtttcataagaaatacctctccttactttgtcatcatcctgaaattggtaacgctataaaataatagcgagctaattatgaggtttgatatatgaaactttttctgacaacagcagcgctaactgcgaccttgatttccggcatggcatttgccagcgatcccgtcatcccctgggcgactaacagcggcggtacggaaagcacgcatattgcggcaatgggcgaggatttgaatgcgcagcatcagcagatcacccacacgcatgaaggcgtatgggcggctaattccggcagcattcaggctgatgaagctgcgctgaccagcaacaagccgccggtacaaggccatccggaattaatgccgcatcagggctaatgatcatggcctggcgataacgccaggcgcttacgggttattcggcgacctgccactgtgcgtctggcgcaaaacgcgtgatagcctgaactttactctccgtctccttgcctaaatccgcctgataaatacgatcgtcctggttgaccataaaactcatcaccccggtttcgccgtaatgcatcggccaggccagaagcgccgcgccgtgaccgtcgttatcgctgataatacggaaatggtagccgtggtaaccctcgtctggcgctgcgggactaaagtttgggcctaacggactggggacgtcgcctgctttggttggccagtacaggccatctttttggccttcgctactgattatcctgtgcgcccagcgatggttttgtaagtaataatcctgctgcgcatcaacgtaagcatgcatggcctgtaaggtagaaagttcatttcgcccaatagtacgggtgaggatctcattcccggctgccgccatatcaaagcgccagccgccagtctctttcaccatgggcaccgggagctgccagtcttctcgtccgacattcaggtgcgccgtattgtctttttgtacaatgcgatggccttcgcgccagtcacgattgaagcgggccacggcctcgggatcggcaccttccggcggcagaaattgccgccagtcatcgcccagtagcgcggtaagctgcgtttcgttttttccggctaccgccgcggcgaaggcgctggcggccgcttccggggaggggaaccgttcctgcgcgtagcccagcaagggtaacgacagtaacagagcgcttaacataacctttttcattatctgctccggttaacggcgatgaaattcatgatgttcagaaaaatgttcccgcgcggcggcgcgttgctcggtgtttaagtgactgccgcgacggctttccaggccgcgtagctgttgcgattgccatgacggcgatcgactgtcgttcccgctaaacacattggcgtgcatattctggcgaaatgcctgacgctgctgcggcgtagaggattcaatacgctggcgggcggtgtctctctgctgttgtgaaacagggtgctgctgggctttagccttcagctcggaacgatgctgctgcgtggtggatttattcagtgtctgctgcgccgcctcgcgacgactgctgttttgtgttccgtcatagccacggtaattattacgctgggcaatttgatttaactgctgcgatgccgccttacgctgggcatcgcgggtgcctggcgctggcaaagaagcgttggccgtatggctgcgctgttgaaattgcgtcatggccgcctggcgctgactgtcgcgagacactggcgcttgctgcgttgcgcttaacccgccgctaacattggtgggatggaaccgttgcgcaacggtattattcggataggggacgccattgcgccaggcgggattatgctgccagcccatcgtttggcccggcaggttttgcccggatatccggttgaaattattgacattgatgttgatattatcgccattatgttgataaccgttaccaccatgatggtaatcatcatcatggtggtcgtcgtcatggtgggtcatcatcccagtctatgctgctgaacaacgcataggtggtggcgacgcccagactataaccaaaacctttaacaaaactgtcggcaaactgctgccccggagggggcggtaaatacaccggcggataagcggtattgggccaggcgccatacaccgtcgcggggttatagttcggcacgtacaccacctgcggattcgcgggttcaatttttataacggtcgacggtgtcgctggcgtactggcggatgtggtggttgtcgtcgtgacggcggtagaagcgctggacttcggcacgctggtgacggtttgctgtggcgtggattttagcgaaccggtttgttgagcgagcagacgcagcctttgcaccgcatccatcacatcctgtggctgggctaagaacgcatcgcccaggttttgcacccattgcggattctcgcccataagcgccatcaactggggaaaggcgaccagcgatttgacgctggggtcccacggttggctggccaccgcctgaatagcggcatcgccctgcagcgtagggttatcgcgcgaccactggacggcctgaactacgttcgccgggtaggtggaggccatgagcacctgcgaaagcagggcatcgggataaagcgcgacaggcgcgacccattgatcaatttgcgcagtggtaaaggtcgttttcgcgacaggcgcgggcacagcggtctgcgttggctcagaggcgggagctgccgcctgcgcgggcgcttcgggagcgcagcttttaacatacagtacgcccgaagcggcaaataacccggcactgcacacaagggcaatgagatggggtttaaagggcaacgtcattttatctctcccgattccagagaatcgctatggtcattatgcctgccgccgacggggtgcagtttggcgtgagtataaagggacgatagtttaatttttagctaatgttgggatcggtaacgttacgtgacgatcaaagcacgaaatgaggtaagcatttatggctgcagctcccgtctcagtagagcattagaccatccttaacgattcagccacttttttatgttgcttttttgtaaacagattaacacttaaagaaaatcctgttattgtgccttatgcggtaccgggcatttaccctactaactactgtctcacaggagcgtgaagagaatcgcccatcaacaaaagcgccgcattatgacaatgagagcgaggagatatcgtcgtgctagaagaataccgtaagcacgtagctgagcgtgctgcccaggggattgtgccaaaacctttagacgcaacccaaatggctgcgcttgtcgagctgctgaagaccccgcctgtgggcgaagaagaattcctgttagacctgttgatcaaccgcgttcctcctggcgtagatgaagccgcttatgttaaagccggttttctcgctgctgtcgcgaaaggcgacaccacctccccgctggtctccccagaaaaagccattgaactgctgggcaccatgcagggtggttacaacattcatccgctgattgatgcgctggacgatgcgaaactggcgccgattgctgccaaagcactgtcccacaccctgctgatgttcgataacttctacgacgtagaagagaaagccaaagcgggcaatgaatatgccaaacaggtgatgcaatcctgggccgacgccgaatggttcctgagccgtccgccgctggcggaaaaaatcaccgtcaccgttttcaaagtgaccggcgaaacgaataccgacgatctctctccggcgccggatgcgtggtcgagaccggatatcccgttacatgcgcaggcgatgctgaaaaacgcccgtgaaggcattgagccggatcagccaggcgttgtcggcccgatcaaacaaatcgaagcattgcagaaaaaaggctacccgctggcttacgtgggtgacgtggtgggcaccggttcttcccgtaaatccgcgaccaactccgtgctgtggttcatgggcgatgacatcccgaacgtgccgaataagcgcggcggcggtctgtgcctcggcggcaaaattgcgcctatcttctttaacactatggaagatgcgggcgcgctgccgattgaagttgacgtttctaacctgaatatgggcgatgtgattgacgtctacccgtacaaaggcgaagtacgcaatcatgaaaccggcgagctactggcaaccttcgaactgaaaaccgacgtgctgattgacgaagtgcgtgccggtggtcgtattccgctgattatcggccgtggcctgaccaccaaagcgcgtgaagcgctggggctgccgcactcagacgttttccgtcaggcaaaagacgtggcggaaagcagccgtggcttctcgctggcacagaaaatggtcggtcgcgcctgtggtgtgaaaggtatccgtccgggcgcgtactgcgaaccgaaaatgacctccgtcggttctcaggatactaccggcccgatgacccgcgacgagctgaaagacctggcctgtctgggattctccgccgatctggtcatgcagtcgttctgtcacaccgcagcctatccgaagccggttgacgtcaccacgcaccacacgctgccagacttcattatgaaccgtggcggtgtctctctgcgtccgggcgacggcgtgattcactcctggctgaaccgtatgctgctgccggataccgtcggtaccggcggtgactcccatacccgtttcccgattggtatctctttcccggcgggttctggtctggtggcgtttgccgccgcgaccggcgtgatgccgctggatatgccggaatccgtgctggtgcgcttcaaaggcaaaatgcagccgggcatcaccctgcgcgatctggtacacgccatcccgctgtacgccatcaaacagggcctgctgaccgttgagaagaaaggcaagaaaaacatcttctctggccgcatcctggaaatcgaaggtctgccggatctgaaagtcgagcaggcgtttgagctgaccgatgcttccgccgagcgttccgctgccggttgtaccatcaagctgaacaaagagccgattgttgaatacctgacctccaacatcgtcctgctgaagtggatgatcgccgaaggctacggcgaccgccgtacgctggaacgtcgtatccagggcatggaaaaatggctggcggacccgcagctgctggaagccgatgctgacgcagagtacgcggcggtgatcgacatcgatctggcggatatcaaagagccaatcctctgtgcgccgaacgatccggacgacgcgcgtctgctgtctgacgtgcagggcgagaagatcgacgaagtgttcatcggctcctgcatgactaacatcggccacttccgtgcagccggcaagctgctggacaaccataaaggccaactgccgactcgcctgtgggtggcgccgccaacccgtatggacgccgcgcagctgaccgaagaaggttactacagcgtgttcggtaagagcggtgcgcgtattgagatccctggctgttccctgtgtatgggtaaccaggcgcgtgtggctgacggtgcgacggtggtttccacttctacccgtaacttcccgaaccgtttaggtaccggtgcgaacgtcttcctggcttctgcggagctggcggcggttgcggcgctgatcggcaaactgccgacgccggaagagtaccagacctacgtggcacaggtggataagacggcggtggatacttaccgttacctgaactttgaccagctttctcagtacaccgagaaagcagatggcgtgattttccagactgcggtttaatttacattttaagggggctaattgccccctttttattcatattatatgtttctgtattttctatctttttaagatgttgcgtatttttattttagcttcttcatattgtaggttttcctctcttaagtatatatgaacagctttgtgacaatttgggcaaagtaatgcaaagtcagttttcaatattctgtgctcaccggtaaaagtatgtattggtattttgtggtgggcctcaatatagtttttaccatatttatctaagaatttaatctcacaaatatcacaaacccattgcgagttatcttttatttcatctattatttttctattccgctcagataacatatgagttatgtatttaatttttccttcagtgtgctcgtttttatacaaaatgacgtcatcattgtcactattcttatcatttagacttgggaaacttatcattttttctaagatgactgctttttctagtatgtctatgattttaaagcatccctgaaattcccatttgttagatgaatcagtaaataacaaaattggatagttgcttatcggttggttaattagaacccggttcgcagaatcattaaagttaatgatgccttttgctgctttaaatgagtaagagtatatggttttttcattatttttccagccatcatcagcgtaagaaccatcctttgtttttattattactgctttgatattgggatgttctcctatccaatttattccttgttgaggtgtgtttttaattatccaatccttgccttcccaattttcactgtcatcttttttagatttttggatgagctgggataaattttgtttgttaattatatctgagatagttaatgaaagaagttgagatggatattgaataagctttaaggttcccattatattcctatactataaagtgtataataattatcattatacatgctagcagtgtaaatttactacattcataatgatagcatgggacgatgctacttgtggaaccagaatgcagataacccgatcttcttattgataaatttacgacaattagacgtatccactttttttcctctacatagctgcgataattacccataggtacaatgcagcggtgacgcattgcctttgtagaggaacagatcatggattacgaatttctgcgcgacgttaccggaggggtaaaagtacgaatgtcgatgggccacgaggtggtcggtcactggtttaatgaagaggttaaagacaacctctcgctactggatgaagtagaacaagccgcgcgtacggtcaaaggcagcgaacgctcctggcaacgagcagggcatgaatacacgatctggatggacggcgaagaagtgatgattcgcgccaatcaactggatttttccggcgatgagatggaagaggggatgagttattacgatgaagagagtttatccctgtgcggcatggaggattttctgcgggtcgtcgccgcgtatcgggaattcgtcagtaaagcctgaccctctcttcgttattgtcccacaacgccagtcgacggacagttgggggcggtagtggaaacgaagtcgccaaacattccagccgggagtatcccggcttttttatagcagaatgattttttgatttttattaatcattttaaaactgtgatctgacgcgtttgtgatcttaatttgattgaatataatcgttatgattttattcaatcacaacaagcaacaggcggtaagaccatgaacatcaaaaaagcaatagagcgcgtacccggcggcatgatggtcgtaccgctcgttattggcgcagtcattaacaccttcgccccgcaggcgcttgagatcggcggttttaccactgccttatttaaaaacggcgcggcaccgctgattggcgcttttctgctgtgtatgggagccggtatcagtgtgaaagccgcgccccaggcgttattgcagggcgggacgattacgctcactaagttgcttgtcgccatcggcattggtctgggcgtggagcatcttttcggcgcggagggtatttttggcctgagcggcgtggcgattatcgcggcgatgagcaattcaaatggcggactttatgctgcgctggtaggcgaattcggcaatgagcgcgacgtcggcgctatctctattttgtctcttaatgatggccctttctttacgatgattgcgctgggcgcggcagggatggcgaacattcccattatggcgctggtggcggtgctggttccgctggttgtcggcatgatcctcggcaatcttgatcctcatatgcgcgattttttgaccaaaggcggcccgctgctcattcctttctttgcttttgcgctgggggcgggcatcaatctggaaatgttactgcaaggcggacttgccggaattctgctcggcgtgctgacaacgttcgttggcggtttctttaatattcgcgcagatcgtctggttggcggaactggcattgccggggcggcggcctccagcaccgcgggtaatgccgttgcgacgccgctggctattgcgcaggccgacccttcgctcgccgaggtggccgctgctgccgctccgctgattgccgcctcggtgatcaccacggcaatcctgacgccagtgttgacctcctgggttgcgaaaaaacaggcgcgtcaggcttctttggagaaaaacgcatgaaaatgatagttatcgccgatgattttaccggatcgaatgataccggcgtccagttggcgaagaagggggcgagaacggaagtcatgttgagcgcgtcgcaaaaaccgtcccgccgcgccgatgtgttagtcattaacaccgaaagccgggcgatgcccgcagatcaggcggcatctgccgtttatgccgcgctttcgccgtggtgtgagacatcgccagcgccgctggtgtacaaaaaaatcgactccacatttcgcggcaatatcggcgccgaagtgacggcggccatgcgcgccagtcagcgaaaactggccgttatcgccgccgcgatccctgcggccggacgcacgacgcttgaaggaaaatgtctggttaatggcgtcccgctactggaaaccgaatttgccagcgatccgaaaacgcccattgtctcttcccgtattgccgagatagtggcgttgcaaagtgagatccctgtgtatgaagtctttttgcaggatgtccgacgcggcgggttaagcgccttacttacggcttatgcggctgagggcgaagggattatcgtcgtggatgcggtggaagagcgggacctgacgttgattgcgcaagcggcgtgtgaacaaccgtcgatgccgctgctcgtcggcgcagcgggtctggcgaatgcgttgccggttgaactttttatgcaagaccggcagcggctgccggtgctggtggtggccggttcgatgagcgaagccacgcgacgtcaggtggataatgcgctgtgccggggacgtgcggaggtcgtggatatcgatgccgcgcgcatggtgtcggatagcgcggaacaggaaatcgcgtctgtcgtagagcaggcctgcgcgctgttaagtcagcatcgacatacgattttacgcaccagccgtcgcgcagaagatcgacagttaatcgacgcgttgtgcgaaaaatccgcgatgagccgtcagcaattgggcgagcgactgagccagcggcttggcgtcgtcacgttaaacattatcgagcaggcgcggattggcgggctgtttctgaccggcggcgatatcgctaccgccgtcgccggcgcgcttggcgctgaaggttatcgcattcagagcgaggtggcgccctgtattccctgtggaacgtttgtaaacagcgaaattgacgatctgccggtcattaccaaagcgggcggattcggttcagacagtacgttgtgtgacgcgctttattatattgaggagatgtattgtggagactaaaaccgttgccattaccatgggcgatccagcgggcattgggccggaaattattgttaaagcgctaagcgaagacggtctcaacggcgcgccgctggtggttattggatgcctcgcaacgttgaaacgtttacaggcgaagggcatcacgccgaacgtcgagttacgggccattgaacgggtcgccgaagcgcgttttgcgcccggcatcattcatgtgattgatgagccgctggcgcagccggaggcgctggaggccgggaaagttcaggcgcaggcgggggatttagcgtatcgctgcgtgaagcgcgccaccgagttagcgttacggggcgacgtacaggctatcgctaccgcgccgctgaataaagaggcgctgcacctggcggggcacaactatccgggccataccgagctgctcgcgaccctgacccatagccgcgattacgcgatggtactttacaccgataaactaaaagtgattcacgtttcaacgcatatcgcgctgcgtaaattccttgatacgttaagtaccgcgcgtgtcgaaacggtgattggcattgctgatactttcctcaagcgtgtgggttacgttaaaccgcgtatcgccgtggcaggcgtgaatcctcatgcgggcgagaatggcctgtttggcgatgaagagacgcgtatcctgacgccagccattaccgatgcccgcgcaaaaggtatggacgtttatgggccgtgcccgccggatactgtatttctccaggcttatgaggggcagtatgatatggtggtggcgatgtatcatgaccaggggcatatcccgttgaaattgcttggcttttatgatggcgtgaatatcaccgcggggctgccgtttattcggacctctgctgatcatggcaccgcatttgatatcgcctggacgggaaaagcaaaatctgagagcatggccgtatcgatcaaactggcaatgcaactggcataattccctgttatgaaaggacaacaccgtctggatctcattgtggcgtatctgaaaaaccatacgctggttacggtagaacagctggttgaggcggttgacgcatcgccagccactatccgtcgcgatttgatcaagctggatgagcagggcgtgatcagccgtagtcatggcggtgtggcgctgcgacgttttgaacccgcccagcccaccaccaatgaaaaacaactgcgatcgcccgctgaaaaacgggcgatcgcacgcgttgccgcatcgctggtcaatgctggcgatgccgtcgtgctggatgccggtacgacaatgatggaactggcgaaatgcttaacccatcttccgctgcgggtcatcaccgtcgatctgcatattgcgctgtttttagctgagttccggcaaattgaagtgacgattgtcggcggtcgtatcgatgacagcagtcagtcctgtatcggtgagcatgggcgcaagctgttgcgcagcgtttacccgaacatcgcgtttatgagctgtaattcatggggggtaaaaacgggcgtgacgaccccaacggaagataaggccgggcttaaacaggagattattgctaatgcgcagcgcaaagtgttgctggcggacagcagtaagtatggcgcgcattcgctctttaatgtggtgccgcttgagcgctttaatgacgtgattaccgacgtcaatctgccgccgtcagcgcaggttgaactgaaagggcgcgcttttgcgctaacgctggtgcagccggagtgacagcgccgtcaggcgctgccagtggtgaatcagaccgcagaaatattgcggccgtagtaaatctcgcgcatctctttccacagcgcggcggtgatctcctggcgttcggtttcagtgagatcttccggtttggtgtgaaacatgtagtgcttaagatcgaactctttaagcagcatcttggtatggaaaatattttcctgatacacgtttacatccaccatgtcatacagcgacttcatatcttccgacataaaattctgaatagaattaatctcatgatcgataaagtgcttcataccgttgacgtcgcgtgtaaagccgcgcacgcggtaatcgatggtgacgatatcggactctagctggtggatcaggtaattgagcgcttttagcggtgaaatcaccccgcaggttgacacttcgatgtcggcgcgaaaggtgcatagcccgccttccggatggctttccggataggtatgcacgcagatatggctcttatcgaggtgcgccaccacggtttccggcagcgggccgggatgttcggtttgatcgataagtttcgggtcgatcggctcttcgctcaccagaatcgtgacgctggcaccctggggttcataatcctgacgggcgatgttcaggatgtttgcgccgataatggagcaggtctccgacaggatctcggtcagtcggttggcgttatagagttcatcgatataggcgatatagccatcgcgctcttctgcggttttggcgtagcagatatcgtaaatacaaaaactcaggcttttcgtcagattgttaaagccatgcagtttcagctttttcaatttttatcacctccttaacgtcactgtgcggacagtgcgtcatgtagatattgcggtagcgcaaatgcagcggcatgaatagccgggttgtaatagcgacatttgaggccggcggcatgaaaacgtgcctgaataatttcgctcgacaggtggcgaagagcgtcgttgtccgtcgcccaggcgaaggtcataatgccgccgtaataggtcggaatcgccgcctggtagaagccgacatcgctgaagtaatgactcagcttgcggtggctgtcgagcgcttcatcctgctgcaggaagcacacgccgttctgggcgacaaaaatgccgcccggattcaggcaacgcttacagccttcataaaaggcggaggtaaacaggctttcgccggggcctatcggatcggtacagtcggaaatgatcacatcaaaggtctgatgggtttgattgacgaaattcacgccgtcgtcgattaccagcgtaaagcgcggatcgtcgtagctgccggcattgtggttgggtaaatactggcggcaaaacgagactacgccagcgtctatctctaccatggtgatggtttcgacgtttttatgccgggtaacttcacgtagcattgcgccgtcgccgccgccgataatcagaacgtgtttcgcatgaccgtgcgccagcagcgggacatgggtcatcatttcatgataaataaactcgtcgcgttcggtggtctgtaccacgccgtccagcgccatcacgcggccaaaagcggcgttttcaaagatgattaaatcctggtgatcggttttttcatgatacagaacgttgtctacggcaaagtactgaccaaactggtcgtgtagcgtttcatgccacatcgtattttcggccattggctgatacctccattgttaacacccgtaaaaaaagggcgcaacatcatagctaacaatgaccgtggatgcacggtcattatttcagcaataggatcacggaggattatttaacgtaggctaacaggctcagagaatcgcgggccagagctttgcattttttagcgaccggaataccgatgccgctaagatcgcggtagctgtcttcgcccaacgatttcatatcgaaggtgtcgtagttactcaggtcccactgattttgctgggcaaaaaagaccagcgcacggcgaatctggctgttgggtaaattttggtaaccacagtcatttttcagaaaaacgaaaactgccgttaaatcggccatatcttcagcttcggattcagtaagcgcatagctatttgcgcataaggccatcaggctgccaaacaacacgggtctgaaaaacgtcttcattgcttctaccacggcatcagggaaagtcaacgttagcatactgagaacgtagcgacgacttttattatcaggattggtcgcggcgttttcattcttattgtattgctgtcaggaatggtaaagacgtgttgctggcttgaccttcccgttagggcagggtctaagcttagacacccgcctgttcattataaggaaatgattatgttacgccgtgatttcttaaaatattcagtggcgctgggggttgcatcagcgctgccgctgtggagccgcgccgcttttgccgccgaacgtcccgcgttgcctattcctgacctgttaacggcagatgcgagcaaccgtatgcagttaattgttaaagccggacagtcgacattcgccggtaagaacgcgacaacctggggctacaacggtaatttgctggggccagcggtacagcttcacaaaggaaaaagcgtgaccgttgatatccataaccaactggccgaagacacgacgcttcactggcatggtctggagattccgggcatcgtcgacggcggcccgcaggggattattcccgcaggcggaacccgcacggtgacgtttacgccggagcaacgcgccgcgacctgctggattcatccgcacaaacacggcaaaaccgggcgccaggtggcgatgggccttgccgggctggtgctgattgaagatgacgagattcgcaaattgcgcctgccgaaacagtggggcatcgacgatgtgccggtgatcattcaggacaaacgcttctccgccgatggccagattgattatcaactggatattatgaccgccgccgtcggctggtttggcgatacgctgctgaccaatggcgctatctatccgcagcattccgcgccgaaaggctggctacgtctgcgcttgctaaatggctgtaatgcgcgctcgctgaatatcgccgccagcgataatcgcccgctttatgtgatcgccagcgacggcggcctgctggcggagccggtgaaagtcaccgaactgccgttattaatgggcgagcgttttgaagtgctggtggatatcagcgacgggaaagcctttgatctggtgaccctgccggtcagccagatgggaatggcgatcgctccgtttgataaaccgcatccggtgatgcgtatccagccgctgcggattaccgcctccggtacgctgccggatacgttgacgacgatgccggcgctgccgtcgctggaagggctgacggtgcgcaacctgaaactgtcgatggacccgcgccttgatatgatggggatgcaaatgctgatgaagaaatatggcgctcaggcgatgagcggcatggatcatgacagcatgaacgcgcatatgcagggcggcaatatggggcatggcgagatggatcatggcaacatggatcacagcgggatgaatcatggcgcgatgggcaatatgaatcacggcggaaaattcgacttccataacgctaactttatcaacggccaggtcttcgatatgaacaaaccgatgttcgcggcgcaaaaaggccgacatgaacgttgggtgatttccggcgtgggtgacatgatgctgcatcctttccatattcatggcacccagttccgtattttgtcagagaacggcaaagcgccagcggcgcacagaacgggctggaaggatacggtacgcgttgagggcggtatcagcgaagtgctggtcaagttcgatcacgacgcgccgaaggaacatgcctatatggcgcactgtcatctgttagaacatgaagatacgggaatgatgttaggatttacggtctgaccgatgtctgtgacgcaggccgggtaaggcgaagccgccacccggcacaatgcccggcatacgccgggcattaatggttatttcgcgtcgtcaggcaaagcataggccacgatatagtcgcccatcttcgtaccaaacgaaccgtggcctccggcagaaacgaccacgtactgcttaccgtttacctcataggtcataggcgttgcctggcctccggcgggtaaacgtccctgccacagtttttccccgttgctcatgttataagcgcgcaggtagttgtcggcggtcgcggcaatgaacagcacattaccggcggttgagattggcccgcccagcatgggcatccccatgttgaacggcaccggaaccggcatcgggaacggcatactgtcgcgcagcgtccctatacgtttcttccacacgatttcattggtcttcagatccaacgcggaaatatagccccaggccggttgtttacacggcaggccaaacggcgaaaggaacggattcagcgtgacgccgaatggtacgccgtactgtggctgaatacccgcttctgtaccggtacctttcgcgtctttcggcggctccattggattacccgggccgcgtgggatcagcttcgagacaaacggcagcgccatcgggttagcgatagcgacctgacggtctggatcgacggaaataccgccccattcaaacatccccaggttgccagggaataccaatgtcccctgctcggacggcggggtgaagataccttcatagcgcaactggtggaacatgacgcggcacaccagttggtcgaacatggtcgcgccccacatatccgcgccggagagatcttttttcgggcggaaggttaaatcagagaacggctgagttttggcgacgtaatcgccttttgccgcgccctgcgggaccggtttttccggggcgggcacgaccagctcgccattacgtctgtccagcacaaagatattaccggttttcgctggcgcatagataaccggaacggtagtaccgtcaacggtaatatccgccagcgtcggctgtgccggcaggtccatatcccacagatcgtgatggacggtctgataactccaggccagtttcccggtggtggcattcagcgccaggatggagctggcataacgctcctgctccggcgtgcggttaccgccccagatatccggcgtggtcacgcccatcggcagatagaccagatccagtttcgcatcataggcggcaggcgcccaggagttcggcgagttaaaggtaaaagcgtgctcatcggctggaatcgcgttcggatctttcgcccccggatcgaaggcccacatgagtttaccgctattaacatcaaaacctcggataacgccggacgtttcgcgggtagagaagttatccgtgaccgaaccggcaatgacaattgttttatcggtgataatcggcggcgacgtcggttcatacagtcccggtgtggtatccggcatattggtttgcagattcaggacgcctttgttggcgaaggtttcacacagcttgccggtttcggcattcaccgcgaaaaggcgaccgtcgttgaccgggaggataatacggcgcggacagtcggcgatgacctccggcgaggcggtatccgctttggcctcatgataagagacgccgcggcaggtcacatgctggaaagacgaatcggtcttcaactgaggatcaaaatgccacttctctttaccgctggcggcgtccagcgcgaacagacgctggtgagctgtacacagataaagcgtatcgccgacttttatcggggtcacttcgttggtgatttcacccggatcgttgggctgtttcagatcgccggtgcggaagacccacgcttctttcagttggtgaacgttatccgcagtgatctgtttcagcggcgaatagcgttggccttcctgattgcgcccataggccggccagtcttcgtcggcgatcgacgaacttgttgcggcgggcgtggcgtcggcgcgaagcgtaccgttgatctcctgcgggtcgttgaagccggcccaggtcagaatgccgccgctaatcagcaacgccacgaccagcgccgccactgcgccactggaaggaaccaccagccgatgccagacaaacggtaatattagccagatgccgaaaaacaccaggatatcgctacgcggcgtgagcgcccagaagtcgaacccgacttcccacacgccccaaatcattgtcgccagcagcagggcggcatacagccacagtgcggcacgtttactgcgccatagcaatccggccacaaccagcatcacgaggcccgcgatggggtagtaccaggaaccgccaatagcaaccagccagacacctccgataagaagatacagcccacaaagtgctgcaaagagggccgtcagcgtcacgagtaatcgtggcgatcgtgcgttattttctgccataaaaagacaccatcccaaattgttaattttttagtagcaattaagtataggaattaacatgtgtgatcgtcatcacaaaatgagctttcttatcaaatgccgcgaatgaatacgtttgctgttatactgcgtgccttgcgcgtcaatgcggcgttattagtcaccggcattgagtgatttgtttttaaatcatatggttataaatatgaaacatactgttgaagtcatgatccccgaagcggagatcaaagcacgtattgccgagttgggtcgtcagattaccgaacgttataaagacagcggcagtgaaatggtgctggtaggtctgttgcgtggctcatttatgtttatggcggacctgtgccgtgaagtccaggttcctcatgaagtcgattttatgaccgcctccagttatggtagcggcatgtccaccacccgcgacgtgaaaatcctcaaagatctggatgaagatattcgtggtaaagacgtgctgattgtcgaagacattattgattccggtaatacgctgtcgaaggtccgtgaaatcctgggcctgcgcgagccgaaatcgctggcgatttgtacgctgctggataaaccttctcgccgcgaagtggacgtgccggttgagttcgttggcttttcgattccggacgaatttgtagtcggttacggtatcgactacgctcagcgttatcgccatctaccgtatgttggtaaagtggtgctgctggacgagtaagcgcagaaatgccggatggcgtcgctaaagcgacttatccggcctatagctaatggcttattggtggggaatgtatttcagacttagggcggaaatacccttatgatagccgttctccagcgtttctctgttggtggcggtgacgtcaagatcgcgcagcaggccatcattgatactgtacgcccagccgtgaatggtcacattctgaccgcgtttccacgctgactgcataatggtggaatgccccaggttatagacctgttccatgacgttcaattcatagagcgcgtccagacgttgctcttcgggcatttttcccaacagcgagctatgtttaagccagatgtcgcggatatgcagcagccagttattaatcaagcccagctcagggttttctaccgcagccttgataccgccgcaaccggagtggccgcaaatgataatatgctcaacttccagaacatctaccgcatactgaaccacggagagacagttcagatcggtgtgaataaccaggttagccacattacggtgaacaaacaattcgcccggttcaagcccggttaaacgctctgcgggaacgcggctgtcggaacatccaatccatagaaagcgcggtttttgcgcttgcgccagtttctcaaaaaatccggggtcctcttccaccagcatttttgaccatagtgcattgttgctgatgagtgtatctatgtctttcatggaagttaacgacctgtaaccaaataagtgcgttgggctaatatagggcaactccgtaattatttaaaccatatataaagtgtaagaacgtaaagtaagtgagaatttatgaccattgcgctggaacttcaacaacttaaaaaaacctatcccggcggcgttcaggcgttgcgcggcatagatttgcaggtcgaagcgggggatttttacgcgcttctggggccaaatggagcagggaaatcgaccaccatcggtattatcagctcattggttaataaaacgtccgggcgcgttaacgtttttggttacgacctggaaaaagacgtggttaacgccaagcgacagcttggactggtgccacaggagtttaactttaacccgtttgaaacggtgcaacagatcgtagtgaatcaggcgggttattacggcgtggaacataaagaggcggttttacgtagcgaaaagtatttaaaacagctcgatctgtgggaaaaacgtcatgaacgcgcgcggatgctctccggtgggatgaagcgccgcctgatgatcgcccgcgcgctgatgcatgagcctaaactattgattctcgatgagccgacggcgggcgtcgatatcgaattgcgtcgctcgatgtggggattcctgaaagatttaaacgccaaaggcaccacgattattcttaccacccactatctggaagaggcagaaatgctgtgccgcaatatcggtattattcagcacggcgagctggtggaaaatacctccatgaaaaatctgctttcaaagctgaaatcggagacgtttattctggatttagcgccaaaaagcccgctacctaagcttacgggttatcaatatcgtctggtggatacctcgactctggaggtggaagtgttacgcgagcagggggttaacagtgtctttagccaactgagcgagcagggggttcaggtattaagtatgcgtaataaagccaaccgtctggaagaactgtttgtgtcgctggtgcatgaaaaacaaggagatcgcgcatgatgcagctttactgggttgcccttaaaagcatctgggcgaaagagatccaccgctttatgcggatctgggggcaaacgctggtgccgcccgtcatcaccatgacgctctattttattattttcggtaacctgattggttcgcgcatcggcgaaatgcatggttttagctatatgcaatttattgtgccgggcctgattatgatggcggtcattactaactcctacgcgaatgtcgcgtcgtcattttttagcgccaagtttcagcgcaatattgaggaactgctggtcgcgccggtaccaacgcacgtgatcatcgccggatttgtcggcggcggcgtagcgcgcgggctgtgcgtagggattctggtgacggcgatttcgctctttttcgtgcctttccaggtgcattcctgggtatttgtcgcgctaacgctgattctgaccgcgattctgttctcgctggccggactgctgaacgccgtgtttgcgaaaacctttgacgatatcagtctgatcccgacctttgtgctgacgccgctgacctacctcggcggggtattttactcgctgacgctgctgccgccgttctggcaagggctgtcgcacctgaacccgatcgtctacatgatcagcggtttccgttatggttttctgggtatccatgatgtgccgctggtgacgacgtttggcgtactggtgatctttatcgctgctttctatctgctgtgttggtcgctgatccagcgcgggcgcgggttgcgcagttaagcgctgactggggagatggggcgttgggttgcgcttcgcttcacttcatctacgggtccgtaatatcaatgggttacgggtcggtaggtgaggcttgtcgaaacccaacgcttctctcagcgaatctgaatctccagcgtggcggtggcctggtattctccggtgtggggaacatgtccggtggtattgaccggcgcggcggtgaactcggtgctgcctctaccgtcagtgtaatcttcaatcggcaattcggcgctgccgccgggaacgatggtattatcgtatttatcggaaatccgtatccccaaattctcattgtcagttttcaggtagtccgggttgtgcggatcggttgcgccatttaatgacattgacaggttggtgccgtccgccacgttgctacaggtaaagtttacctgagtggtgacgtgcgagttctgcgggctgtcgccgaggtgacgaatatctttgccctcaatatccggtagcctgacctcgataacctgcccggcgttgatggagcaggactgcggcacggtaatggtcccggacatggtgacgtgcgccatcggtggaacggaagggggaatattatctccgctgctgcccggcgtttttgacaaatagagattcataatcgtcgtctcaggaatggtgatttcacctaccaatgggtgagtaatataaatacgcacgttacccttattccctgcggacattttgtttatgtccgcgcccgtacacccgcctgcggtggggtcctgattactgatcgctgaaaagggaacggggatatactgtttcaggttaccgacgatgtaggtttccgtaccaatctccagcttacccgcgaccagaacataaaaatccatctgttgcccattgctacccgcttcgctgtacgttcctttttgtgttaaatcgccggtcgtggcggtgaaatagttaacgccctgataatctttattatcgcagtcgcacctggcgctgtattcgccgccgaccgaccaactctctttgactattttccctgcctggttctcatccgtatcggtaatggtctggtcaaggggaaaaaagaaattatgcgtgccgctggtgggttgacaccagccgcttccgttgcccatcgttccgtctgccagcgcatggcctgaaaatagcgatagcgccagcagcatccataaattcttcattgtgttcctcactggcagacggcgttcgccatcactatgccgttcatatttttgctgatatccaggcggtaatccgcgcggcaagaggcgcttccccagttcaccagcagcaggccctcttccggcaggccgctgaggaagacctggcctttatcgccgacgatactggccaggttcgcatcctgcccatcgacgcttgccgtcgcgccaaagggcacgggctcgccattgctgcgcgtcagcgttaacaacacgcgatagcccttatgcgtgtcatacgccgcgcgcaccaccgcattacgcgtcgggtagacggtctggttgttgagcggaatatccacgttgtcagcaaacgtgctgctgtcgagcgagatatcgtagcgataatacggcgtgacgttggggatcaccgtataaccccggaagtcggtggcgacgccggtctggttttcaaccgaaacgccgctggcgccgggcgctttaattaaaatcgccgcgccggtaatcggctggctcagggtaataccgttttcgtgcgccagaatgccgccgctgatgccgtagctgacttgttggctatctggcgactgattgtaaccggcgttgaggttggcataagtgcctttatagctggcgtttaccccgccggaatcaccgtcttgtgtgctgtggctttgctgtaacgaccagttcaggtttctgtcacgcagcgcggtgccgctaagggtggtgctgttcaccgtggcatcgtgcttacgcgtgttcagcatatagctggcgtatagcctggaatcgaacaccgtaaacggaacgtgcagcgacagcgtgaacagccgatcgttctggttataacgatcgtcgtcgttgtcatcatcgtcattgtccgaacggtactggtaggtgtttttgttatagctgtagctcagcgtatagctcaccggaccccagctattgttgtagctggcgctcagggattccatctgctgcgcgctgtgccagtaatcttctttgacccaacttagcgttaaggaaccgagcgtattgctaatttgctggttgaccgaagcttcgaaacgattatggcgcttgccgtagttatcataaaaatcgtcgtccgggttgatcacctcgctcagcgaattgtagttttcgctggcgtaacgatagccggccagcgaaaacgtggtgcccgtactgacgacgcccttgctgtagcggacgtgccaggattgcccgatttctttgcggccatcgtcaaatttggcgtgcgaccagatgccgtccagggaaatggcccccagcatctgcatattttgcccgacgccgaaggcgacggactggtatttatcgccggcaatctggctgccgccgtacagggtgatgccccacggcaggccgtacagcagggtcgcctggccgaagtcgtccagcgcgtggttgttataatcgcgatatttacccacggtcacgctgtattttgcccgtccggtgcgctgcagaatcggcagcgaagagtagggcacgataaaatgctgttcgctgccgtcggcttcttttaccgtcacgtcatagtcgccgttgctgccggtgggaaacatatcgttgatttcaaattcgcccggcgaaacggcggtctgataggcgatatagccgttttgccgcacgataacctgcgcgtttgagcgggcgatgccgcgaatcgtcggggcgtaaccacgctggctgttgggctgcatttgatcgtcagaggtgagctggaggccgcgaaaaggtacgctgtcgaacacgtcggatggcgtattgctgtctccggcggtgaactggcttttcagcgcgataatgtcgcgctgtaaatagttataaacgctgttccagctaccgttctcgccgttatttgaactccagttactgtagttgcgaaaacgccacggcccgaggttaaaacccggctggagagcgagatacttcgattccgcatcgtcggaatcctcactggaaccgtactctttatagccgctgaagctgtagttcagcatcagcgcggtaatcccctcctgccacttttccggcggtacgtagccgcgtgcgttgttggcgatgtagagttgcgggatgcttactgataatgcctgttgctgaaaatcaaaccgctggctggcgccggggataacgctgagatcgacgcagcctttttcactctccagcgttggaaaaaggtcggttttgacgccgttatcttttagttcctggagccgtaaacagccctgtaatgcctgttgaccgtcactgagcgtcgcgagttgaaaatcaacgtttcgtgcgccgatttctgttttattgatattgatagtgacgtaataggtgccaggcagctggcttttgtcgttatcaaatgtcgacagatcgacgcttgtgcgattcgcctgcccatggttttcaataaatgccggattgaaatagtcgcgcgcccatgcaacgtgtgtgaacgtgctgcccagcgcgatacacacagcgcagcgcgataaataaaatacccggtgttgccttttgcgcatcggcactctcatccctgtcactcttctcaaggcgtttgtttatgttcggggccagtaccgccaaaatcgttgatgatagaccagacaatcgggccgctggcggcggcaggcagcgtgtactgcgcgttgccgaaaggcgccacatagcgcggggctttcactttttgactgccaacggaaagggtggcgaagttcatataatagggcgtggggttcttcacggtgagcgtgcgaccctgacgcgaccacgttaaccgatcggcaacctcttctggtttttgggttaacgcttttggccggtaaatcagcttaaattccgctttaacggccagcatgagtgtgttgtgtttattgtccggattgctgctgggaatcgatttaatatccagccagtacagcgactcgcgatcttccggcaaattgccgccggtacggataattcgtagtacgttcttttgcccgccattaaggcgaaaaagcggcggggtgaccataaacggcgcatcaccgctcgccccggtttcactgatcgattgcgcccaggactgaattaaatagggaacgttgtcgctattgcttatcgatatggacgcatctttggcatcgccgtgaaaaataacccgcgttgtgccgatgtttatccctgcggcatgcgccagcgaaccgcacaacaggcaacaaagcaaccctgctttagccaatgaattcattgatgacctcaataaacaaaggggccagccgacgctggccaccaggatcagttatattgcagatagaatgttgcggttgcatcgaccgttcccgacttaacgggaaccgcggtggcgatatagcgggcggtgaaaggcattgagagttccgtcaccccctctgctgtagggaggttgactggggcagaccatgcctgaagatcgttaaaggtcataggggtgctagttttatcaagaatttgcacgccaatattctcagcatcatcctcatttttcaggatggtcgcatcggttccgtcgagtgtgccttcaaagcgcgcctgtacactgctgtagacgtttgcgtcgcagttttcgagttcgatggtgaagtctgtatcccctgccgtctgccctgcggcagtgaaaagagaggcaaattcttcctgtaatgtcacctctactgaatccgtttttaccgtacaggcgttttgcttaatgaggccggtgatatgtacggtgccgtctttggcggtgtctgccagcgcggcgggggagagggtgatggcggccagtgccacagtgagtgtttttaaggagagtttcattatctttgatcctttaagatattataaatattgacatagtaacaatatctatagtgtggaaagttattgttctttttattcccgaatgagtaaatataatgtccgatgatttttacggcgcgaagaaaaattcagaatacataaatatgaaatatttataatatatatttaatcaattattttggtgagtgtttgtttaattgaatcgccgtgattaccctttaatgggccagattctatgaaggctgctaacaattttaaaaataatgcaaatttttttgaataaaaaatgatcgtggtcatagtgtgttgtcggccaaaaaaacatgctgacatcatgcaggattggagctcaatggaggagaagttatgctgggatgggtcatttcctgtcatgacgatcgggcgcaggaaatgctcgaaggtcttgaaaagaagtatgggccgttggcgcagtgtcgggcggtcaatttctggcgtgggttaagcgtaaatatgctcagccgcatgatgtgtgacgccctccatgccaccgactccggtgaaggcgtgatatttttaaccgacatttccggcgcggcgccttatcgtgtagcgtcgctgatgagccataaacattctcaatgtgaagttatttccggtgtcagctattcattgatggaggaaatgattacctggcgagagtcaatgagcagttcagcatttcgcgaccagattgtcgcgcttggcgcgccggatgtcaccagtctctggcatcagcagcagaaaaatccgccttttgtattgctgcatgattcgtatgagttttgatcaataccattgacgacgcttttgctacaatgacggcgttttttcgcctcggttatgatatatggttatgcgcgttgttcttatcttgctgttctttttcgccggtaatgtgttggctgccttgcccgctcgttatatgcaaacgacgaaagatgccgccatctggtcgcagattggcgacaaaatggtgaccgtagggaatatccgcgccggacaaattctttccgtaacgcctgttgcggctgattattatgcctttaaattcggcttcggtgtgggctttatcgataaaggccatctggaatccgtgcagggaaaacaaaaagtggaagatggcctgggcgatcttaacaagccgctcagcaatcagaatctggtgacctggaaggacacgccggtgtataacgcgccggacatcagtagcgccccgtttggcgtattggtggataatttgcgttaccccattattagcaagctgaaaggccggctacatcaaacctggtatcagatccgtattggcgacaggctggcttatgtcaacgccatggatgcgcaggaagacaacggcattccgattttgacctatcatcacattttacgtgatgaagagaatacccgttttcgccatacctccaccacgacttcggttcgggcattcagcaaccaaatgacctggcttcgcgatcgcggctatgccacgttgacgatgtaccaactggaggattacatctataaccgcgctaatttcccggcgcgcgcggtggctatcacctttgatgatggccttaaatcggtgagtcgctatgcgtatccggtattaaagcagtacgatatgaaagcgacggcatttattatctcatcgcgtattaagcgccatccgcaaaaatggaatcccaggtcgctgcaatttatgagcgtgtccgaattgcgcaagataagcgatgtttttgattttcagtcgcatacccattttttacaccgggtagacgggcatcgccgcccgattttatatagccgcagctaccataatattctgtttgattttgaacgctcgcggcgggcgctcgcacagtttactccgcacgtattttatctttcttatccctttggcggttataacgcgaccgcgatcaaagcagcaaaagacgccggtttccatctggcggtaaccacggtgagagggaaggtgaagccgggagataatccgatgctgctcaaaaggctgtatattctgcgcacggattcgctggaaaccatgtcgcggctgatcagcaaccagccgcagggataaggactatcaggcaacctgtaccggaatagctttcgcggtgcgcttcatttcgttgtcgccttcaaaataggccactttcggacgccatgtacgcgcttcttcatcagacatggtgacgaagctggcgataatcacaatgtcgccaacttcagcgcagtgcgccgccgcaccgttcaccgagatgattctggagccgcgttcagccgcaatcgcataggttgagaaacgtttcccattggtcacgttccagatatcaatcgcttcgttttccagaataccggaggcatcaaggaaatcctggtcaatggcacaggaaccttcgtagtgcaggtccgcctgcgtgacttttacgcggtggagcttgccttgcagcatggtgcgaatcataacttctttaccctgtcgtttaccttggctaagcaggcgcttgtggcctgctttggaaattctcaggcagtattgcccgatttttaacccctgtctactgggctaatgtaacgctttgattatcgatcagacgcgcctgacccagccaggcggcagccagaatcactgcgcgtttgctggtttccgtcagctccagcagcgtgtcggcatcacggatttgaatgtcgtcggcacggaagcctttttcattcagttcctgttcggcaatggcaataatctcttgcagctcacgattacccgcaatcagtttttcagcgatgctattcatcacgttgtatagacccggcgcaattttgcgctgctctgcggtcagataagcgttacgtgagctgagcgccagaccgtctttagcgcgaataatcggcacgccgacgatctcaatgtcataactcatatccgccaccattttgcggatcagcgccagttgctggaaatccttctcgccaaagcaggcgatatccggctggatcaggttgaacagcttgctgacgatagtcgagacgccgcggaaatgacctggacggctggcgccttccagcatggtagagaggccgggaacatcaacgtacgtctggccttccagcccatgcgggtagatttcctcaacggctggcgcaaagacataatcgactttgcgtttgttcagcttttcacaatcttcctgcagcgtgcgcggataacgcaccagatcgtccggccgatcaaactgcatcggattgacgaaaatgctgacgatcaccacatcagcccgggcttttgcctcatcgaccagcttcatatggccgtcgtgcaggttgcccatggtgggaaccagtgcgacgcgtttaccttcctgacgcagacgacgaatatgctggcgcagcagcggcagggtttcaatgattagcacaacaaaactccttgagttgcttgatgatcctgcccgatggcgctgcgcttatcaggcctacatccgttgaggatctgtaggccggataagacgcgtcgcgtcgccatccggcacggtcagaaaaattagtgaaagctgtgttcttcgcccggataaacgccggactccacttcagccatatactgctgtacggcggcgcgcatgtcgcccgcttcggcgaggaaatttttcgcgaattttggaatatgaccgccggtgatgccaaacgcatcgtgcatcaccaggatctgaccgtcggtgacgttgcccgcgccgatgccgatcaccggaatcgacagcgcttccgtgacgcgcttcgccagctcaaccggcacgcactccagcaccagcagttgagcgccagcggcttctaaagccagcgcgtcatccagcagcacttgtcctgcatctccacggccctgaattttatagccgccgaagatattcaccgactggggcgttaaccccagatgaccacaaaccggcacggcgcgttcggtgagcattttcaccgtatcaaccagccaggcgccgccttcaattttgaccatattggcccccgcacgcatcacgatagccgcgttttcacatgcctgttccggggtggcgtaagccataaacggcaggtcggagagcaatagacagttgggcgcgccgcggcgtaccgcgcgggtgtggtaggcgatatcttccacggtgacaggcagggtggagtcgtgcccctgaattgtcatgcccagagagtcgccaaccagcatcacattgataccttcgtcggcaaataacttagcgaagctgtagtcgtaggcggtaattgtcgcgaagcgttttttctcttgcttgcatttctgcagcagtgaaatggtggtgggtttcataacgtttcctgatggtaaaagttatatttcccggcattctaacagtcatattcaggggggcaattgatttaagcaatcgtttggcgctaaagcagtaaacgctaaaggggaggcgatgttttaccagtgggcgggttttgcagcaccaagatgggtgagatgctgatgcaggctgataccatccggaaagatcagatcaggagcgatttcgaataacggccacagcataaaaccgcggtttttcatgtcgtagtgcggcacggtcagacggtcggtgttaatgacttcatcgccaaacagcataatgtcgagatccagcgtgcgcggcccccagcgttcggctttgcgcacccggccctgttgcagctcaatgcgctgggtatggttaagcaattcttcgggggcgagagcggtatccagcgccaccgcagcgttcaggtaatcgggctgatcctgtgggccaagcggcggcgtgcggtaaaacgaagaaaccgcgacgatacggctatcgggaatgtcggcgatagccttcagggcggcattgacctgctccagcggagaggccagattactgccaagcgcgatatacgcgatcgtcatacggtgccctcgcggcgcggcgcgcgtttgcgcggacgtgaacgacggcggcgtggagcaggatcgtcgtccagctcgttgagcatccctttttgttccggcggcgcggaagcctgaaactcggcccaccactgcgccagacgttgcagttcagtattattttccacctgagcgcgcagctccagtaaatcaaacgcggcgcggaatttgggatgttccatcagtttccaggcgcgtttgccctgacgtcgcgacatgcgtaactgaagctgccaaatatcacgggtaagcgtggtaaggcgtttcgggatcgccagtgaacggcaggcctcatccagcacatcattcatggccagcgcgaaagcgtcgtaataggccagaccgctctcctgagcgattttttgcgccatctccagcagcggataccagaacatggcggcaaacaaaaatgccggattaacgcgcatctcgttacggatgcggttatccgtattcttcaacacctgcgcaatgatgcgttccattgcgctgtcgccgttttcggtgaaataacgcgtaatggtaggaaacaacggctggaagaggtggtattcccgcagttgttgataggtttcgtaaccgttccccgcctgcaacagcttcagcgactcttcgaacaggcgcgcgggaggaatgtcgtttagcaaggttgccagacgcgggattggctcagccgtttcagggctgatatgcatattgagcttcgcagcgaaacgcacggcgcgcagcattcgaaccggatcttcgcggtagcgcgtttccggattgccgatcaggcgaatcacgccttcttgcagatcctgcatcccgccgacgtaatcgcgcacggtaaaatccgccacgctgtagtaaaggctgttgatggtgaaatcgcggcgctgggcatcttcttcgatagagccgaagatgttgtcgcgcagcagcataccgttttgcccacgctgggaggtcgtacggtcgctttcactgccttcatgatgaccacgaaacgttgccacttcgataatttccgggccaaacatcacgtgagccaggcggaaacgacgtcccaccagacggcaattgcggaataatttccgtacctgatccggtgttgcgttggtagtcacgtcgaaatccttcggctttttgccgagcaggagatcgcggacgccgccgccgaccaggtaggcttcatagcccgctttgttcagcctgtacagtaccttgagggcattttcactgatatctttgcgggagatagcgtgctgttcacgcgggataatcgtcatatgtggacgggcgacggcttgttctgcctcgctctcctcgcggcttaacaccttacggcaaaaattagcgactcgggtaaaaatagcgcacctcggtagtgtcatacattaataagatcaacttactctatgtctttcgcattacggcagacgggcgtaagagagcaacgcgacctgggctgtaagcatcattaacgccgcagcaatgcgaaagacgatgagcaaaaatagcggctaatcatagctcagcgagacgcatttgagaatgccggatttacattagccgatgtgggtacggctgtaagcctccagtgcgccactgcaaagcgcagcaactcctcaacagacatctcctgccacgctacgacgtcgcgttggcctaaaaagcgcaatgcctggaccagtaccgggcgcggatcgcctgtcgcaagcgcaggggcatgattttgcttggaaagtttagcgccttgttcgttgagcgccagcggaaggtgcacgtagcctggcgcacgccagccaaactgtttatacagcgaaagttgtcggacagtgggttcgattaaatctgcgccgcggacgatctccgtcaccccctgaaaatgatcgtcgaccaccacggccagattataagcaaacagtccgtcgcggcggtggataataaaatcttcgctcgccagctgtgggtcagcctggatgtcgccgcgcaaggcatcatggaaatgcatcaccggatgctgctgtttaattctgacggcggcattctccggcccgtggcataacgtccgacaatggccgtcgtaaataccgcccagacgttgaatgcgcgagcgggggcaagtgcagtagtagctcagtccctgctcgtgaagccaggccagcgcctcgcgataagcctcatgacgctgtgattgccataagacctcgccatcccagtgcaggccgtaatgttccagctggcgcagaatggtcgctgcggcaccgggaacttcacgtggggggtcgatatcctcgatgcgaacgcgccaaattccgcgttgcgcacgggcttgtagatagctgccgagggcggcgattaacgagccgaaatgcagttcgccggatggcgacggcgcgaaacggccaatatagtgtgagtcagtcatgctgcgggcaataaagaataaggcgggaaaactcccgcctgtcataaatagggtagaaacgaacgggattaacccgccatctgtttttcgcgaatttcagccagcgttttgcagtcgatgcacagatcggctgttggacgcgcttccaggcggcggataccaatctccaccccgcaggactcgcaataaccgaagtcttcatcttccactttcttcagcgtcttctcgatctttttgatcagtttgcgctcacggtcacgattacgtaactccaggctaaactcctcttcctgcgcggcgcgatcgaccggatcggggaagttggcggcttcgtcctgcatgtgcgtcacagtgcgatcgacttcatcccggagttgattacgccatgcttcaagaatacgcttgaagtgcgatagctgggcttcgttcatatactcttcgcccggtttctcctggtacggctccaccccagcgatggcgagaatactcagggacgatgttttacggttttgcccttcttgcatgttgcttctccttaacacgcactatcgatccccatgttcgggggaaaatcaggtcgctataaatagcagatgcttttccggatagcaattatctaaacgtaacacttgacaaccctgtgaggaaaagcgtatttacgcacgcggccagaatacttaataatcaggctgttattccactacaacgttatgggtactggttcgttcagttccattttttgggctgaaagttctgctttataagctaaaacttccacgcctttattctgagcctcgctcaatagctgcgcgtattttatatcgatatgacgtgcgggggaaaaacgtgtaatggcggagtgcagcaccgcgaacaccaccactgcgcgatgacctgccgccgcaacgcccatcaattcccgaagatgtttttgccctcgttcggtgatggcgtcgggaaaataaccgttttctttttccgctaacgtgaccgatttcacttcaatatagcagtccgggcggaaatctgcctgtaacataaaatctatacggctgcgctcggcgccatatttgacttcacttttcagaatattgtaccccgccagcgccggcaggcgattctcctgaatcgcttctttcgttagctggttcgcccgcagcgtattcacgcaaatgaatgcgccggattgcgtttcagtcaattcccaggtatgcggatatttgcgtttagtattttctgatgtcgaataccagacggtatcgccaggcgtggcgcagccggtcatcgcgccggtattaggacagtgcagcgtaagcgtcgtaccgtcaggggtgatcacatcggctaaaaaacgtttatagcgctgaatcagcgtagcgcgttgtaaagggggtgaaaatagcatcgacattccttcattattattcgcccagcgtccagcgctgcagctcggcatagcgggtacggccttgcccatacgaagaggcgtaaagcgcaaacgacgtgaccggaaatgaccagcaaaagcccggcggcgggatagccaccgtatggctggcgtcgcgcagcagcgtaatatgcgggtgaaaaggctgcgggctttggtaacaaccgctgcgggcggcctgcgcgcgcagcatattagccaactgcaacaacccgcgcggcggctggcgcatccccagccacaccacgcgcgaacgcagccactgaccggcgtcatccagatgtagcgtaaagcccggctgtcgaattcgtccggccagttgcgcaagcgcgcgctgcttatcgctactgacgtcgcctaaaaaggccagcgtcaggtgcaggttcgccgctgccacggggcgtccgtcttcagacgcaaaatgggcggcgcgccaggcgataatttgcgcgcgcgcgtcgtcgggtaagtcaatcgcaaaaaacagccgttttggctcagacatagggatactcggttatggattaacacgatgctacaatgcggcgcaaagaaagttaaccccgtggagccgtttgtgacgtcattgcccgttgccgccgtattgcctgaattgttgacagccctaaaaatcgcgccgcaggttttgttgtccgcgcctaccggggcggggaaatccacctggctgccgttgcaactcctgcaacaggggccggttgctggaaaaatcctcctgcttgaaccgcgtcgtctggcggcgcgtaatgtcgcacagcgtctggcggaagcgttgaatgaaaagcctggcgaaacggtaggttaccggatgcgcgcgcaaagctgcgtggggccgcgtacccggctggaagtggtgaccgaaggcgtattgaccagaatgattcagcgcgatcccgaattacgcggcgtggggctggtgatactggatgaatttcatgagcgcagtttacaggcggatttagcgttggcgctgttgctggatatccagcaagggctccgtgacgatctcaggctgttaatcatgtctgcgacgctggataacgacaggctttgtcagcgactgcctgatgcgccgacgatcgtctcggaggggcgcgcgttcccggtggagcgacgttatcagccgcttgcggcgcatttgcgttttgatgaagccgtcgcgatggcgacagcggaactgctgcgcaatgaaaacggttcgctgctgctatttttacccggcgtaggcgaaatacagcgcgttcatgaacatctggcgtcgcgggtagggagcgatgtcctgctttgtccgctgtatggcgcattgtctctggaagcgcaacgcaaagcgattgttccggcacccgccgggatgcgtaaagtggtgttggcgactaacattgccgaaaccagtttgacgattgaagggattcgtctggtcgtcgatagcgctcaggagcgcgtggcgcgatttgacgcgcgaacgggactgacgcggctggttacgcagcgtatcagtcaggcatcaatgacgcagcgcgcggggcgcgccggacgactggcgccgggtatctgtttacatctgctggccaaagaacaggcggagcgggcggcggcgcaaagcgatccggaaatcttacacagcgacctttccggtttattgatggaggtgttgcagtggggatgtcacgatccggcatcgcttttctggctggacaggccgccggaggtgaatcttcaggccgcccgccgtttattattgatgttaggcgcgctggagggcgagcggttaagcgcgcggggccggaaaatggcggcaatgggtaacgatccgcgcctggcggcgatgttagtcaacgccggcgagggcgatagcgccgccactgccgccatgctcgcggccatccttgaggacccgccgcgcggcggcggtacggatttaagcgtagtattttcgcggcgacagccgggctggcagcagcgtagccagcagcttttaaaacggctgcaggtgcgtaatggcgagccggatagcgcgcttattatgccgctgttggccagagcgtttagcgaccgcatcgcgcggcgtcgtggtcaggaagggcgctatcagttagccaatggtatgggcgcgatgttagatgcggatgacgcgttgggacgtcatgaatggctgatcgcgccgctgttactgcaaggtagcgcctcgccggacgcccgaatattgttggcgcagccgctggatattgcctcgctgattcaggcgtgtcctgatttactgcgccagtccgacacggttgaatgggacgaggcgcagggaacgttgaaagcatggcgcagaatgcgtattggacagttgacggttagcgttcagccactggcgaagccgtctgaagaggagcttcatcaggcgatgctgaacggcatccgcgataaaggtctgtccgtccttaactggacgccggaagcggagcagttccgtctgcgtctgcactgtgcggcgaaatggctgccggaatatgactggcctgccgtggatgaggcgtcgctgctggcgactctggaaaattggttgctgccgcacatgacaggcgtacagtcgttacgagggctaaaatccctgaacgttaatcaggcgttacggggactgcttgactatgccatgctgcaacgtctggatagtgaactgcctgggcattacactgtgccgacgggaagccgaataacgattcgttatcatgaagataacccgcccgcgctggcggtcagaatgcaggaaatgtttggcgaagcgaagaccccaaccatcgctcagggccgcgtgccgctggtgctggaactgctttcgccagcgcagcgaccgctacagattacgcgcgatttaagcgctttctggcagggggcgtatcgcgaagtgcaaaaagagatgaagggccgttaccccaaacatgtctggccggacgatccggcgaatacggccccaacgcggcgcacgaagaagtattcgtgacgtgttatacgttgcctccaggccagataaggcgttaatcgccatccggcaaaagagtaaattgagagatttcttcttctgtcgtctggcggaagaatagagaatcgggcctttgcgcctgtatgttgcggagaaaaagcatggcggggaatgaccgcgagccgattggacgtaaggggaaaccgtcacgtcctgtgaaacaaaaggtgagccgtcgtcggcagcatgacgacgattatgatgatgactatgaggatgaagaaccgatgccgcgtaaaggtaagggcaaagggcgtaagcctcgtggcaagcgcggctggctgtggctattgctaaaactgtttatcgtttttgtggtgctgttcgccatttacggcgtctatctggatcaaaaaatccgcagccgtatcgatggcaaggtctggcagcttccggcggcggtatatggccggatggtgaaccttgagccagacatgcctgtcagcaaaaacgagatggtgaaattgctggaagcgacgcagtatcgtctggtgacgaagatgacccgtcccggcgaatttaccgtgcaggccaatagcattgagatgatccgtcgtccgtttgacttcccggacagcaaagaagggcaggtgcgcgcgcggctgacgttcagtgacgggcgtctggaaaccatcgtcaatctggataacaaccgccagtttggcttcttccgtctcgatccgcggcttatcaccatgctttcttcgccaaatggcgagcagcgtttattcgtcccgcgcagcggtttcccggatctgctggtcgatacgctgttggcgacggaagaccgtcatttctatgagcatgatggcattagtctttactctatcgggcgtgcggtgctggccaacctgacggcgggacgcacggtgcagggggccagtacgctgacccagcagctggtgaagaacctgttcctctccagcgaaagatcatactggcgtaaagcgaatgaagcctacatggcgctgatcatggatgcccgttacagtaaagatcgtattcttgagctgtacatgaacgaggtctacctcggtcaaagcggggacaatgaaattcgcggttttccgctggcgagcctgtattactttggtcgtccggtagaggaactgagcctcgatcagcaggcgttactggtggggatggtaaaaggggcgtcgatttataacccgtggcgtaacccgaaactggcgttggagcgtcgtaacctggtgttacgcctgttacagcagcagaaaatcatcgatcaggaactctatgacatgctgagcgcgcgtccgcttggcgtacagccgcgcggcggcgttatttcaccgcagccagcgtttatgcagatggttcgtcaggaactgcaggcgaagctgggggataaaattaaagatctctccggcgtgaagatcttcaccacctttgactccgtggcgcaggatgccgcagaaaaagccgttgtcgaaggtattccggcgttgaagaagcagcgtaaattgagcgatctggaaaccgcgatggtggtggtggatcgctttagcggcgaggtgcgcgcgatggttggcggggcggagccgcagtatgccggctataaccgtgccatgcaggcgcgccgttccatcgggtcgctggcgaaaccggcgacctatctgaccgcgttaagtcagccgaacttataccgtctgaacacctggattgccgatgcgccgatttctctgcgccagccgaatggtcaggtctggtcgccgcagaacgacgatcgtcgctacagcgaaagcgggaaagtgatgctggtggatgcgttaactcgctcaatgaacgtaccgacggtcaatctggggatggcgttaggtttaccggcggtaaccgatacctggacgaagctcggcgtgccgaaagatcagctcaatccggttccggctatgctgttaggagcgctgaacctgacgccgatcgaagtggcgcaggcgttccagactatcgccagcggcggaaatcgcgcgccgttatcagcgctgcgttcagttattgcggaagatggtaaagtgctgtaccaaagttatccgcaagctgaacgcgccgtaccggcacaggcggcttacctgacgctctggacaatgcagcaggtcgtccagcgtggtacggggcgtcagcttggcgcgaaatatccgggtctgcatctggccggtaaaaccgggacgacaaacaacaatgtcgatacctggtttgccggtatcgacggcagccaggtgactatcacctgggtaggccgtgataacaaccagccgacgaaattgtacggcgccagcggcgcgatggcgatttaccagcgctatctggcgaaccagacgccgacgcctttagttctgacgccgccggaagatgtggtggatatgggcgttgattacgacggtaattttgtctgtagcggcggtatgcgcactctgccggtctggacggacgatccaaatacgctgtgccagcagggcgagatgatgcagcaacagcagcagccgtcaggcaatccgttcgatcagtcgtctcagccgcagcagcctgcgcagcaacagccgccgaaagaagagaagagcgacggcgttgccggctggattaaggagatgttcggcggcaattaatcacggtaatagtgccgggtggcgctgtgcttacccggtctacaccgttacgaccccattatgtgcgacgtaggccgaataagacgcttacgtcgccatccggcaaatcctccataaataacatttcagtctaatttattaacccttccttttcatctggttatttcttaaccccttagttttcgtagggccgcgtatcgcttgccattgcgacgatatttcgcctatcatgctgcggttataataataattatcgtttacgttatcattcactttcatcagagatataccaatggcgcgtcttaaaactgctcagccaaactcctcactgcgtaaaatcgcagttgtagtagccacagcggttagcggcatgtctgtctatgcacaggcggcggttcaaccgaaagaagaaaccattaccgtaaccgcagcgcctgccgcgcaggaaagtgcctggggaccggctccgaccatcgccgcgaagcgttccgccaccaccaccaaaactgatacacctatcgaaaaaacgccacagtcggtttcggtggtcactaacgaagagatgcagatgcatcaattccagtcagtaaaagaagcgttgggttacacgccgggtgtaacggtaagcagccgcggcgcttccaatacctatgacttcgtgattatccgtggcttctcttccgtcggcctgagccagaacaactatctggatggcctgaaattgcaggggaacttctacaacgatgcggttattgatccctacatgcttgagcgtgttgagttgatgcgtggcccaacgtccgtcctctacggtaagagcaacccgggcggtatcatttcgatggttagcaagcggccgactactgagccgctgaaagaaattcaattcaaaatggggacggacaatttgttccagaccggttttgattttagtgattccctggatgacaacggtgagttctcatatcgtctgacggggctggcgcgttcgacaaatgagcagcaaaagagttctgagtcgcagcgctatgcgattgcgccctcttttacctggcgtcctgatgagaaaacgaattttacgttcctttcttatttccagaacgaaccagagaccggctactacggctggctgccgaaagagggaacggttgaaccgttaccgaatggtaaacgcttgccgacagatttcaatgaaggggcgtcaaacaacacctattctcgtaacgagaaaatggtgggatacagtttcgagcatggcttcaacgacacttttaccgtgcgccagaatttacgttttgtcgaaatgaaaaccgcgcaaaaaagcgtctatggcacggggattgcggcggacggccatacgcttaaccgcggtactatcgttgacaacgagcgtttacagaatttcagcgtagatacacaactggaaagtaaattcgcgaccggcgatattgatcatacgttgctgacgggtgtcgatttcatgcgtatgcgtaatgatattaacgcgacgtttggtagcgcgccgtcaatcgatctctataacaattaccatcctgaatactttgctttcggcggcgctgagccgtaccagatgaacgaaagtaaacaaacaggcctctatgttcaggatcaggcggaatggaataagtgggtatttactctcggcggccgctatgactggtctaaacaagcgacaacggtgcgtcagaattccactacgccgacagaaggatatattgaacgtaatgaccaccagttcacctggcgcggtggcgtaaactacgtattcgataatggaatttcaccttacttcagctatagccaatctttcgagccaagcgccttcgatttgtggagcaccccacgcgtttcttacaagccgtcaaaaggcgagcaatatgaagcaggggtgaaatatgtaccgaaagacatgccggttgttgttacgggtgccgtttatcagctgaccaaaaccaataacctgaccgccgatccaaccaacccattagcgcaggtgccggcaggcgaaattcgtgcgcgaggtgtagagctggaagccaaagcagcattgacggctaacatcaatatgacggcgtcttacacttatactgatgctgaatacacgaaagacactaatctgaaagggaatacgccagagcaggtgcctgaacacatggcgtcgttgtggggcgattacaccttcaacgaaggtccgttgtcaggtttaacgctgggaacaggcggtcgttttattggttccagttacggcgatccggctaatagcttcaaggtaggcagcgcagcggtgatggatgcggtcgtcaagtacgatctggcgcgttttggtatggcgggctccagcattgcggttaacgttaataatctgctcgaccgcgaatacgtcgccagctgcttccagacctacggctgtttctggggcgcagaacgtcaggtcgttgcaacggcaaccttccgtttctaatttctttttgggcacggcttgccgtgcccgttttacaagttggctgcgatgcaggaaaaccacattcattccgataccacctttgcgctgcgaagcgtcgcctttcgtgtgccgggccgcacgcttttacaccccctctcgttaacgtttcccgcaggtcgcgtcaccggacttattggtcataatggttccggtaaatccacgctgttaaaaatgctgggccgccatcagccgccttccgaaggggatattctgctcgacaatcagccgctggcgagctggagcagcaaggcgtttgcccgcaaagttgcctatctgcctcaacaattgccacaggcggaaggaatgacggtgcgcgaactggtggcgattggccgctatccgtggcacggcgcgctgggacgctttggcgtcgcggaccgggaaaaagtagacgaggcgattacgctggtcggcttaaaaccgctggcgcatcgtctggtagacagtctttccggcggtgaacgccagcgcgcgtggattgccatgctggtcgcgcaggacagccgttgtctgctgctggatgagccgacgtcagcgctggatatcgcccatcaggttgacgtgctggcgctggtgcatcgtttaagccaacagcgcgggctgacggtggtagcggtgctgcacgatatcaacatggcggcccgctactgtgattatttagtcgcgctacgcggcggtgaaatgattgcgcaaggaacgcctgcggaactgatgcgcagtgacacgctggaacagatttacggtatcccgatgggtatccttccgcatccggcgggcgcggcacctgtgagttttgtgtattaatgcgtgatttatatcctcttactcgccgccgtttattaacggcgatggcgctctcgccgctgctgtggcaaatgaatacggcgcaggctgccgctatcgatccccgccggattgtggcgctggagtggctgccggttgagctgctgctggcgctcggtattacgccgtatggcgtggcggacgtgccaaattataagctgtgggttagcgaaccgccgttgccggattcggtgattgatgtgggtcttcgcactgaacccaatctcgaactgctgacggagatgaagccgtcgtttatggtctggtcggcaggctacggaccctcgccggagaaactggcgcggatcgcgccggggcgcgggttcgattttagcgacggcaaaaagccgctggcggtggcccgacgctcgctggttgaactggcgcagacgctgaatctggaagctgcggcagaaaaacatctggcgcaatacgatcgcttcatcgccagccagaagccgcattttatccgccgcggggggcgtccgttactgatgacgacgcttatcgatccgcggcatatgctggtgctcggcccgaattgcctgttccaggaggtgctggacgagtatggcatcgtcaatgcctggcagggtgaaaccaacttttggggcagtacggcggttagcatcgatcggctggcgatgtataaagaagcggatgtgatctgcttcgatcacgggaataacaccgatatgaacgcgctgatggcaacgccgctgtggcaggccatgccgtttgtccgcgccgggcgctttcaccgggtgcccgccgtttggttctatggcgcgaccctctccacgatgcactttgtccgcatcctgaataacgtgttgggaggcaaagcgtgagcagaaaacgtgaaatgccggatggcggcgcgaaaagcgtcttatccgacctacggttcgggcgctttgtaggccggataaggcgaagccgccatccggcgttgctgttattggcgctgtttgttgccgcctgctggctgacatgggttaacttctccgttgcgctaccgcgcagccagtggcaacaggctatctggtcaccggatatcgacatcattgagcagatgatttttcattacagccagctgccaagactggcgatttcgctgctggtgggcgcggggcttgggctggtaggcgtcctgttccagcaagtattacgtaacccgctggcggaaccgaccacgctgggcgtggcgaccggcgcgcaattggggatcacggtgactatgctttgggcgattcccggcgcgctgaccacgcagtttgccgccctgacgggagcctgtatcgtcggcgcgctggtgttcggcgtggcgtggggcaaacgtctgtcgccagtgaccctgatcctcgccgggctggtggttagcctctattgtggcgcaatcaaccagttactggtgattttccaccacgatcagttgcaaagcatgtttttatggagcaccggaacgctaacgcaaaccgactggagcggcgtgcagcgtctgtggccgcagttgctgggcggtgtgatgctcacgttattgttgttacgcccgatgacgctgatggggctggatgacggcgttgcgcgtaatctgggtctggcgctgtcgttagcgcgtctggcggcgctgtcgctggcgattgtgttgagcgctctgctggtcaacgcggtgggcattatcggttttatcggcctgtttgcgccgctgctggcgaaaatgcttggcgcaagacgtctgctggcgcgcctgatgctggcgccgctcattggggcgcttattttgtggctatccgatcagattatcctttggctaacccgcgtatggatggaggtttccaccgggtcagtgacggcgttaatcggcgcgccgctgctcctgtggctgctgccgcggcttaaaagcatgagcgcgccggatatgaacgccagcgatcgtgtggcagcggaacgtcggcacgttcttgcttttgccgttgccggtggcgcgctcctgctgctggcaacatgggtcgccctctcttttggtcgcgacgcgcacggctggacgtgggcgagcggaacgctgcttgaagaactgatgccgtggcgctggccgcggatactggcggcgttaatggcgggcgtcatgctggcggtggcgggctgcattattcagcgtctgaccggtaatccaatggccagcccggaagtgctggggatcagttccggagccgcgtttggcgtggtgttgatgctgtttttggtgccggggaatgccttcggttggctactgcctgccggaagcctgggcgcggcggcgacactgctgattattatgatagccgccgggcgcggcggtttctcgccgcaacggatgttgctggcggggatggcgctcagcaccgcgtttaccatgctgctaatgatgctccaggcgagcggcgacccgcggatggcggaagtattgacctggctctcaggatctacctataacgccactggcgggcaggttacgcgaaccgcgatcgtgatggtgattttgctggccattgtgccgttgtgtcgccgctggttaacgattttgcccctgggcggcgatgccgcgcgtgcggtgggcatggcgcttacgccgtcgcgtatcgcgctgctggcgctggcggcttgtttgacggcaaccgcgacgatgaccattgggccgctgagtttcgttggactgatggcgccgcatattgcgcggatgctcggttttcgccggacgatgccgcatatggtcatctcggcgctggcagggggcgttttactggtctttgccgactggtgcggcaggatggcgctatttccgtatcagatcccggcgggactgctttcaagctttattggcgcgccgtactttatctatttgctacgtaaacagagtcggtaaaaaaaagctgtgccacatttatgtcgggtggcagccatgctcaacccgacctacaaattacacaatatcaatatgttgtggcaatattttgtaggcctaaaaatagctgaacgctatcaggtgcgagagctgtcctgtcacgttttatcgagggaactctgcttttattttcagcaagaagcaggtgttatttttgtatcgataagtcatgagctatttcagtggcgcgccgctgtctcgtgaacagggtgactaatttcaacatatccaggcccgaaacgttgatgataaattgcggcatgatctatccaataataagaattaccggtttcggtattaagcctttttaaatattaagatgcggatgccgcatctttaatgcatctcgtaaatcaattttaatttaataataaattttcattataaaacttcgataataaaatattattttttatcgaagtaataaaaaacaactctattaaaataaattaattgccacgagtaaacaaaaaaaatgtaatttagcattttttgttttttttaatgaaatttataccaaaaataaatgttacgcgtcattgctatatattcagtactgtaattctgatctttttttattcattttgacatgtttattgtttttttggctctcccgtcttgcttgctttgtttgttttttgaacggtaaaaatatttattatttaattctgataatcctttaaataaaaaacgcttgtctttgggtttttaatggaaaatacttcaccgcgcctaagggatgttatttattaacgtgttgtttgcttcttttgaatgttgcatcggcaatttcataactcgtcatataatatatatctactaatataaacatggggtattgagtataactctgtgtgaatagcgtaaaaatactcaccaacttttaataaggatgaaaaatgaatacagcagtaaaagctgcggttgctgccgcactggttatgggtgtttccagctttgccaatgctgcgggcagtaatactggtacggtgacttttaccggtactattgaagattcaccgtgttcaatcgtggttggcgacgaacaccagaccgttaacctgggccatatcggtaccggttctctgatgggcggtaaagaatcttcaaaagtcgatttccatatcggtctggaaaactgcgcattcaccactgagaaagaagcgtctaccgttttctctgccatcggtaacgaatccagcgctaatccgggcagcgttgcgctgatgcgtatcggcggcggcgaaatggcgggttccagcattgttatcggcaaccacctgggttccgcgatcaaattgggcgacgcttacagcgaaaacctgacgatgaacggcagcgttgcggcggcgaaacagactcttaacttcaaagcctgggtgaaaggcgattctgctgccaccactatcgataccggcgaattcagcagcaccgtaaacttcacgatcagctatctgtaagtgaaatatcatcctgcggcagtctgccgcaggatgatgctcaaagtaaaaaaatagattatatatttcagggatagattgtctgatggctcactataaaaaatttcgtctgagcacgcttgcggccgtggtgggtattgttctggctgtcggtccggaaaatagctacgcggaagcgcccattcaatttaatacccgatttcttgatgttaaagatgatgccagcctggatctctcccgtttttcccgtaaaggctacattatgccggggagctatcatctccaggtgctggtcaatcagagtcaaattgtccaggataatgttattacgtattccgttgataataacgatcctgataacacctatccctgtttatcgcctgaactggtctcgctgctggggttaaaacctgaaatagcagataaaatgatctggataaatgccggtcagtgtctgcaaccagatcaactggaagggatggaaacccaaacggatttaagccagtcaacgctgacggtgattattccgcaggcgtatctggaatacagcgatgaagagtgggatccaccttcccgctgggatgaagggattcccggcgtattatttgactacaacgttaacagccagtggcgacatgctgaacatgatgacggcgatgaatatgacatcagcggcaacggcacggtgggtgccaacctcggcgcgtggcgtttgcgcgcggactggcaggctaactatcgtcacgaaaatgacagcgaagataaagacaactttggctccagttccgaacagaactgggactggaaccgctattacgcctggcgggcgatcccgcagctccgggcgcagctaacgctgggcgaaggatcgctggaatccgatattttcgacggctttaactatgttggcggcagccttatcaccgacgatcagatgttaccgcctaatctgcgcggctacgccccggatatatcaggcgtggcgcgcaccaacgccaaagtcaccgtgacccagcgcgggcgggtgatttatgagtcgcaggtcccggctgggccgtttcgcattcaggatattaatgaaacggtatccggcgatctacacgtcaaaattgaagaacaaagcggtcaggtgcaggaatatgacgtcagcaccgcctccattccgtttctgacccgtcccggccaggtgcgctacaagttggcagccgggcgaccgcaggactgggatcacaatatggaaggcggctttttcacctcagccgaagcctcctgggggatcgctaacggctggtcgctgtacggcggtgccatcggtgagcaggattatcaggcgctggcgttaggactggggcgcgatctggcgctgctgggcgcgttttccgtcgatgtcacccattcccgtgcgacgctgccagagggtagcgcctacggcgacggcaccattcagggtaactcgttccgtgccagctacgctaaagattttgatgatatagacagccgtctgacgtttgctggttatcgcttttccgaagaaaactacatgacgatggacgagtttatcgatacgcataatgacgataacgatcgtcagcgcaccggccacgataaagagatgtataccctgacgtacagccagaacttttcggcaataaacgtcaacgcctatatcaactacacccatcgcacctactggaatcaacctaaccaggacagctataacctgacgctgtcgcactatttcgatgtcggtgaggtgcgcgggatcagtctgtcggtgaacggttttcgcaacgaatatgacaatgagcgtgatgacggcgtgtacgtctcgctcagtattccgtggggcaacaaccgcacgctgagctacaacggctcctttagcgatgacaacaacagcaatcaggtcggctattacgagcgcattgacgatcgcaataactaccagatcaacgctggtcgcgcggataacggtgcgactctcgacggctactaccgttatcaagcgagctatgccgacattgacgtcagtgcgaactatcaggaaggcgactatacctccggcggactgaacatccagggcggcgcgacgctgactgctaaaggcggggcgttgcaccgcaccagcgtcaacggcggctcgcggctgctggtggatgtcggcgatgaagcgaacgtacccatctccggctacagcacgccggtatataccaacgcgtttggtaaagccgtcattgtcgacgtcaacgactactaccgcaaccaggtgaaaatcgacattacccagttgccggaagacgcggaagcaatcctctccatcgctcaggcgaccctgacggaaggggcgatcggttatcgccgcatggaggtgctcagcggtaaaaaagccatggccagtatccgcctgcgcgatggcggcacgccgcccttcggcgcagaggtttacaacagtcgccagcaacagttagggatcgtaggtgaagacggcagcgtttatctgatcggcattaaccccggcgagcggttgcaggtgacatgggaaggtaaaacgcagtgtgaagcgacgttgcccgatccgctgccgggcgatctgtttagcggcctgttgctgccgtgcatcggcgacgcttcatcacctgaggcaacgcagcccgaagagaaaccattactccagcttcatacgcagcggcggacgtcttcgacgcaacccgaagcgctctcttctcgttatccaacacattgattcaggaaaccgcattcatgatgtcattaaaacgttataacctggccgctgttttgctgcttttgctgggcggctacggtagcgcccaggccgccatcgcgcccgatcgcacccgcctggtgtttcgcggcgaagataaatcgataagcgtcgatctgaaaaacgccaacagcaaactgccctatctggcgcagtcctgggtggaagatgagaagggcgtcaaaatcacctcgcctttaatcgtcgtcccaccggtccagcgcattgagccgtcggcaatcggacaggtcaaaattcaggggatgccggcgctggcgtcgctcccccaggatcgggaaacccttttttattacaacgtgcgcgaaattccgccgcaaagcgacaagcccaatacgctgcaaatcgccctgcaaacgcgcatcaaagttttttaccgcccgcaggcgctatcgaaaatcgatatgcagcatccctggcaatacaagatcacccttcagcgtcagggcaatggctatcaggtgagcaacacaaccggctactacgtggtgttaagcaacgccagcaaccgcatggacggcacaccagccagaggctttagccctttagtgattgcaccaaaaagcaacgtgacgctgggaggggacgccagtgaattaggtcactcgcctgtgctgacttacgtcaacgattatggcgcgcggttaccgctgatttttaactgtactgacaacagttgtgcggtagatgaagcaaaaagcagaaagtcgtaaccgacaaggagacgcaagatgaggcaatggcggttacggctgggcacggtaacgtgtgcggccatgctgagtgcggtcagtatgccgctggcagcgggaagtaagacggtcaacatgacgctgacgatagtcgttaatgccgcgccgccctgtactgtgaccggcggtgaggtggaatttggcaatgtgttgacgacgaaagtggatggggtgaattaccggcaggcggtgggctatcgcctgagctgtaacggcagagtgagcgattacctgaagttacagattcaggggaatgcggtgactatcaatggcgagtcggtattgcaaaccgatgtcgatggattgggtatccgtctgcaaaccgccacggatggcgcgctgatttcacccggcaatacgcaatggttgtcatttcaatacagcggcggcagcggtccggccattgaggcgattcccgtcaaaaataatggcgtaacgttaacaggtggcgcgtttaacgcaggcgccacgttggtggtggattaccaatgaaaaaaatagttttgacgatgttaatggggggcagccttgccgcacaggcagccgataatcttaagtttcacggcacattaatttcaccgccgaattgtacgattaacaatgatcagacgatcgacgttaagttcggtaacctgctgattaataaaatagatggtacgcgttatgcgcagaatgttccgtatgagatcacctgtgattcaacggtgcgcgatgagacgatggcgatgaccctgacgctaagcggttccgtgagtgattttaatccggcggcggtaaacaccagcgtggcggggctggggattgaactcaggcagaacgaccaaccctttacgttggggtccaccattacggtgaatgaacaatcgatacctgttctgaaagccataccggttaaaaagagcggtgcttcgctgaaagaaggcggcttcgatgcgacggcaacattacaggtggattatcagtaatggctaaaagacaggcgttattacacggcgcggcctgcatcctctgtggggcgctgatattgccggtctcagcggcagataacctgcatttttccggtagcctggtggccagtccttgcacgctcacgatgcaggggacggggattgccgaagtcgatttttcgtcgcttgacagttctgatttcactcccgacggccagtctgctcgtaagcctttggtgtttgaactcacggattgcgattcggcgctgagtaacggggtgcaggtgactttcactggaaccgaagcgaccggaatgcgcggtatcctggccatcgatagctattcaggcgcttccgggatcgggattggtattgaaacgctatccggcgttcccgtgggcatgaacgataaagagggtgcgatatttacgctggtgacggggaaaaatacgctaaacctgaatgcctgggtacaacgtcttcccggcgaggacctgattccgggaaggttctctgcaagtgcgctagccacatttgagtatttataatgaaaataatacggactttatttttgctgctgattgccgtttatggcagttcggtagtggccaaacccatgctgaaagcgacgttttcaagcaccacgatgtattatggtattggccctaatagcgacaaatctattgtggcggaggtgacgatagcgactccggagggagtgtactatggctcctggaacctttcgggacatcgtaaaggagaaacgctaaccgcagactcctggtctgggccagaacctgcgccgaaggttgtattgaaggattttgataacactgtttcgcgatctgcgtgcaagaatcttccctcgaactggagggggtgtggttcttttaccctggagattacggtacaaagcgatgattatggttgcccctggctggcgtcgagccatatcgttgctaccacttttatcactaacgaaacgtattccccgccggatacgcgcagttcagtttgcccgaaagttcccgttgatacttttgatatctcctgggatgcgaacgtttcgaaacagaaaacaaccctcatgcttgatgccaccggtggcacggtgaatcgcacgttacatacctatttgatggaggggggaaaactgtgcgatggcagcaaatttgacaaccgtggcgcttattgccgttttgtctcatcgggtattacgctcaatgtgctgggctgcgaccagtcgagcgtcacgaccagcgccgttgatcatccgataaccgatgttgagcttcatgacattaatgtagcggtgaacacccgcaacattggctccgggcagttcacgtcgacctgtagcttccagtatattattgatgagctttagggggctgggtgtttggcgaagattcacgctaacctggtatgaaccaaaaaaaaaccgggtggcggcttcgccttacccggcctacgttgtttctggacgttctcttttacagtttcgcaaacacccgacgcgcggcgtcaatagtattattaatgtcgtccatgctgtgtgcgaccgacataaagcccgcctcaaacgccgatggcgccagatatacgccttcctccagcatcaggtggaagaaacgcttaaagcgttccacgtcgcacgccatcacgtcctgatagcaggttacgctctcagcgtcggtgaagaaaatcccgaacatgccgccgacatggttgacgaccagtgggatccccgcctcctgcgccgcttcgcacagcccttccgccaggcgggtggtgagctcatccagcgtttcatgaatgccgggctgggcgacttcattcaggcaggcgaaaccggccgccatcgcaatcgggttgccggaaagggtgcccgcctggtaaaccgggcccgtcggcgccagcgcatccattacatcgcgacgaccgccaaacgcgcctaccggcatcccgccgccgatgattttacccagacaggtcaggtccggcacgacgccgtagtaatcctgggctccggccagcgctacgcgaaaaccggtcattacttcgtcgataatcagcagcgcgccgaactcatcgcacaaggcgcgcagacctggcagaaattccggcagcggcgggacgcagttcatattgcccgccacgggttcgacgatgatactggcgatttcctgcggatattgttcaaatgccgcgcgcactgacgtcagatcgttataagtgcaggtcagcgtatgtttcgcgaaatctgccggcacgcccggcgagttcggctgaccgagcgtcagcgcgccagaaccggctttgaccagcagacagtctgcgtggccgtggtagcagccttcgaatttgataatcttatcgcggccagtaaaaccacgcgccaggcgaatagcgctcatcgtcgcttcggtgccggagttcaccatgcgcaccatgtccatggtcggcaccaggttggtgaccagttccgccattttcacttccatttcggttggcgcgccgaagcttaaaccgcgctccgcagcttcgatcaccgcattgcggatagccggatggttatgccccagtaccattggtccccaggaaccgacatagtcgatatacgctttgccatcgacatcataaagataagcgccgtccgctttttcgataaacagcggggtgccgcccacgccagtgaaggcgcgaacaggggagttcacgccgccggggatcagctcgcgggccgcgctatagagattttcagacttactcatggaaagattcctggttcgtagaaaaagtgaatacccgctattctaagttattcagagaaggttatgaaagttttacgcatttgaaacaatacgatttgcaggggattttcgcggcgttggcgagtagaatgccgactttagatttgtattaccaattaatgatcttctgatgaaaacagacacttccacctttttagctcagcaaattgtgcgtttacggcgcagagatcagattcgccggttaatgcagcgggataaaacgccgctggccatcctgttcatggcggccgttgtcggcacgcttaccggactggttggcgtcgcctttgaaaaggcggtttcctgggtacaaaacatgcgcattggcgcgctggttcaggtcgcggaccatgcgtttttgctttggccgctggcctttatcctttcggcgttactggcgatggtcggctactttttggtgcgaaaatttgcgccggaagccggcggctcgggtatcccggaaattgaaggtgcgctggaggagttacgtccggtgcgctggtggcgcgtgttgccggtgaagtttatcggcgggatgggaacgttgggcgcaggaatggtattagggcgcgaagggccaacggtgcaaatcgggggcaacctggggcgcatggtgctggatgtttttcgtatgcgcagcgccgaagcgcggcatacgttgctggcgaccggcgcggcggcggggctctctgcggcgtttaacgcgccgctggcgggtatcctgtttattattgaagagatgcgcccgcagtttcgctacaacctgatttcgattaaagcggtgtttaccggcgtcatcatgtcgagcattgtgttccgcatatttaacggcgaagcgccgattattgaagtcggcaaactgtctgatgcgccggttaacacgctgtggttataccttatcctcggtattatttttggctgcgtcgggccggtatttaattcgctggtgctgcgtacccaggatatgtttcagcgctttcatggcggcgaaattaaaaaatgggtgcttatgggcggcgcgatcggcggcctgtgcggtattctggggttgattgagccggccgcggcaggcggcggatttaaccttattcctatcgccgcggcaggtaattttagcgtcgggctactgctgttcatctttattacccgggttgtcacgacgctgctttgcttttcttccggcgcgccggggggcattttcgccccgatgctggcgctgggaacgctgcttggtacggccttcggtatggcggcggcagtgcttttcccgcagtatcacctggaggccggtacctttgcgattgccgggatgggggcgctgatggcggcgtcggtgcgcgccccgttgacagggattgtgctggtgctggagatgaccgataactatcagctcattttgccaatgattatcacctgtcttggcgcgacactattagcccagtttttgggcgggaaaccgttatactcaaccatcctggcgcgcactctggcgaagcaggatgcggaacaggcggcgaaaaaccagaatgcgcctgcggacgagaatacttgaacgaattaccagggtattagataatgactgccaatattgggtgaaaatttatccaattaccgatgtcgtttggagcaaaatatgagtgatgacgtagcgctgccgctgcagtttaccgacgcagcagcgaataaagtaaaaagtcttatcgctgacgaagataacccgaatctgaaactgcgcgtgtatatcaccggcggtggttgcagcggcttccagtatggttttacctttgacgatcaggtgaacgaaggggatatgaccatcgaaaaacagggcgttggcctggtggttgacccgatgagtttgcagtatctggtgggtggttcggtagattataccgaaggtctggaaggttcccgcttcattgtaaccaacccgaatgcgaaaagtacctgcgggtgtggctcttccttcagcatttgattgctgttcgttgtgccggatggcgacgcgagcgtcttatccggcctacaggaaagatgttccaggcccgataagcgtagcgccatcgggcaaaacaatatcaacgtccgttttcatccagggcaaacgtcggcaatttcaaatgccagcgaatggccgccagccgaatgaacagcgtgaccaccatacccatcatgctggcgctttccagcggtactgaaaacgtataaaacgcggtggcgtgaacaatcccgccgataatacaggccgtggcatagatttcggtgcgtaggatcatggggatctcgcgtgccagaacatcgcgaataatcccgccgccgacgccggtaatcacgcccatacagacagccactaatggccccgtttcagcgaggaaggctttattcaccccaatgccgacaaacaccgccagcccgaccgcatccagtaccggcaacatccatttcggtagacgtcttggctggcgaaccagtaggatggtcagcatactggtgaccatggcgacgaccaggtcggtaggatctttaacccagaataccgggccgttatccagcgccatatcgcggattgtcccgccgccgacggcagtaacgacgccgagcaccaggacgccgaacgggtccatacgtaatttcccggccagcaacacgccagagatagcaaatacagccgtgcctacaatatccagccaatagacgagcattgtcgaatccccactgggagcctggtaagacaggctctaattcacctgtgaaagcgcattacagagttgttttgcggcgaggataatacgcgggcttgcgcgttcaaaccagtcgctgttaagcggaataaccggaatttttaacaggtttccccagtattgttcaattttgagaatttcgcccgcttttccggccacgataatggcctggggatgccttgccagcacctgctcacggctgacttgcggccacggcacgcggctgtcagcaaagacgttttctccgccgcaggtcgtcaaaacctgatgttgaatagaccctttaccactggtaaacagaggattcatgccaaactgaagaaagacgcgctttttagctttaccggcatactcggcgttgagcgcggcgtactcgtttagcaatgtctgcgctgcctgctgagccttttccggctgcgggctccaggcggccagttgacggagcgtgtcggcgatctgttcgatggttaccgcgtccacccacatgaccttaatacctaatgacgtcagttggtttacctggcgttccgcattaccgccgcgccaggcgacgaccagatccggcttcagcgccacaatgcgttccagattcattccctgccaggtagagacttgttctattttttgcgcttcgggcgggtagtcggaatagctgctgacgccaacgggcgtaatcccggcggcaaaagcgagctccgtattggcgggagagagggtaatgacgcgcggcgcagcgtaaagccacaccgggagcgtaagcagcagggcgaccagcgccctgaacatttgcttagccatgcgccagtttctgtaccagcgtttcgaccatcagagtcgactgtttcgccgccaccgcgaggaattcgtcaaagctgaggtgcgattgctgatcggccacgtcagaaatagcgcgaaccaccacgaacggcacgttgaagttatggcagacgtgggcgatagcggtggcttccatctctacggcgaccgcgtcggggaagttatgccggattttcgccagcccgacggaaccgttaataaacgcgtcgccgctaacaataaggccgcgtaccgcgttcagattcagctctctgatgcaggattccgcggcggcgatcagtttgtcatcggccttaaatccggccggacagcccggtaattgcccgtattcatagccgaaagcggtcacatcagcgtcgtggtaacgcgcttcgtcagagacgacgatatcgccgaccttcagcgtggacgccagaccgcctgcggaaccggtattgatgatcacgtccggcttgcagtgctccagaagcaacgttgcgcccagcgccgccgcgactttaccgataccggatttcagcaacgccacttcggtgccgttcaactggccagtgtaaatttcgcagccgcccagcgtaatcgtctgacggttgtcaattttgtcacgcagcagcgtaacttcttcttccattgcgccaatgatgccgattttcatagatttactcgcgataagtcagttttgggggcatagtttatcatgcgcttatggggaagcgcatttctcaggcggggagaggatatggcatcgatcgatttccgaaataaaattaactggcatcgtcgttatcgttcaccgcagggtgtaaagacggagcatgagatcctgcggatttttgaaagcgatcgcgggcggattatcaactctccggctatacgccgtttgcagcaaaaaacgcaggttttcccgctggagcgcaatgccgcggtgcgtactcgcctgacgcattcgatggaggtgcagcaggtagggcgttatatcgcgaaagagattttaagccgtctgaaagagcaagaccgactggaggagtacggcctggacgcgctgaccggtccctttgaaagtattgtggaaatggcctgcctgatgcacgacatcggtaatccgccgttcggtcattttggcgaggcggcgatcaatgactggtttcgtcagcggctgcatccggaagatgcggaaagtcagccgctcacgcatgatcgctgtgtggtttcctcgctacggttacaggaaggcgaagaaaatctgaacgatattcgccgcaaggtacgtcaggatatctgccattttgaaggcaatgcacagggaattcgtctggtacatacgctcatgcggatgaatcttacctgggcgcaggtcggcggaattttaaaatatacccgtccggcatggtggcgagggccggtgccggattcccatcgctatttaatgaagaaaccgggctattatctttctgaagagaagtatattgcgaggttacgtaaagaactgcagttagcgccttacagtcgctttccattaacgtggattatggaagccgcagatgatatttcttattgtgtcgccgatcttgaagacgcggtagagaaaagaatctttagcgttgagcagctttatcaccatttatatcacgcgtggtgccaccatgagaaggattcgctgtttgagctggtggtaggaaatgcgtgggaaaaatcacgcgccaatacattaagccgcagtaccgaagatcagttttttatgtatttacgcgtaaatacattaaataaactggtgccctatgccgctcagcgttttattgataatttgccgcagatttttgccggtaccttcaatcaggcgttactggaagatgccagcggttttagccgcctgcttgaactctataagaatgtggcggttgagcatgtgtttagccatccggatgtagaacagcttgaactacagggataccgggtgatcagcgggttattagatatctatcagccgctattaagcttgtcgcttaacgactttcgcgagctggtggaaaaagaacggttgaaacgcttccccatagaatcgcgcttatttcagaaactttctacgcgccatcgtttggcctacgtggaagtcgtcagtaaattacccacggattcggcggagtacccggtactggaatattattatcgctgtcggttgattcaggattatatcagcgggatgactgacctttacgcatgggatgaatatcggcgtttgatggcggtcgaacagtaaatggacttttgtaaagatggacaataaatttttactttttccagaaactttattccggaacttcgcgttataaaatgaatctgacgtacacagcaattttgcgttacctgttaatcgagattgaaacacatgaaaaaaaccacattagcaatgagtgcactggctctgagtttaggtttggcattgtcgcctctgtctgccacggcggctgaaacgtcctcttcagcaatgactgcccagcagatgccaagcctggcaccgatgctcgaaaaagtgatgccatcggtggtcagtattaatgttgaaggtagcaccacggtgaatacgccgcgtatgccgcgtaatttccagcagttctttggcgatgactccccgttctgccaggacggttctccgttccagaattctccgttctgccagggcggcggtaacggcggcaacggcggtcaacaacagaaattcatggcgctgggctccggcgtaattattgacgccgcgaagggctacgtcgtcaccaacaaccacgtggttgataacgccagcgtgattaaagtacagcttagcgatgggcgtaaattcgatgctaaagtggtgggcaaagatccgcgttctgatatcgcgctgattcaaattcagaatccgaagaacctgacggcgattaagctggcggactccgacgcgctgcgcgtgggggattataccgtcgctattggtaacccgtttggtctgggcgaaacggtgacgtcaggtatcgtttcggcgctggggcgtagcggcctgaacgtagaaaattacgagaactttattcagaccgacgccgcgattaaccgtggtaactccggcggcgcgctggtgaacctgaacggtgagctgatcggtattaacaccgcgattctggcgccggacggcggcaacatcggtatcggcttcgctatccccagtaacatggtgaaaaacctgacgtcgcagatggtggaatacggccaggtgaaacgcggcgaactggggatcatggggactgagctgaattccgaattggcgaaagcgatgaaagtcgacgcccagcgaggcgcgttcgtcagccaggtgatgccgaattcgtccgcggcgaaagcgggtatcaaagccggggatgtcattacctcgctgaacggtaaaccgatcagcagctttgcggcgctgcgcgctcaggtcggcactatgccggtcggcagcaaaatcagcctcggtctgctgcgtgaaggtaaagcgattacggtgaatctggaactgcagcagagcagccagagtcaggttgattccagcaccatcttcagcgggattgaaggcgctgaaatgagcaataaaggccaggataaaggcgttgtggtgagcagcgtgaaagcgaactcacccgccgcgcaaattggcctcaaaaaaggcgatgtgattatcggcgctaaccagcagccggtgaaaaatatcgccgagctgcgtaagattctcgacagcaagccgtcggttctggcgctgaatattcagcgtggtgatagttctatttatttgctgatgcagtaatcacctttgtcccccttccgccatggaagggggcaacacttttctgtgaaaccccccacaactccatacttatttgcaccgttttgtgcatttgcacaatgtcgagacctgtcatcttccttatgcttgtgctctgctcacaggagggatttatggctggctggcatcttgataccaaaatggcgcaggatatcgtggcgcgcactatgcgcatcatcgataccaatatcaacgtaatggatgcccgcgggcgcattatcggcagcggcgatcgggaacgtattggtgaattgcacgaaggcgcgctgttagtgctgtcgcagggccgggttgtggatatcgacgacgccgtggcgcgacacctgcacggggtgcgtcaggggattaatcttcccttacgtcttgagggcgaaattgtcggcgtgatcggcctcaccggcgaaccagagcacctgcgtaaatatggcgaactggtgtgtatgactgccgaaatgatgctggagcagtcgcggttaatgcaccttttggcgcaggatagccgtttgcgcgaagagttggtgatgaacctgattcaggccgaagaaaatacgccggcgctggtggaatgggcgcagcgtttggggatcgatttgaaccagccgcgtgtggcggcggtggtggaagtcgacagcggccagcttggcgtcgatagcgcaatggcggaacttcagcagttgcagaatgcgcttaccacgccggagcgtaacaacctgatagccattgtttctctcaccgagatggtggtactcaaacccgccttaaactcgtttggtcgttgggatgctgaagatcatcgtaagcgcgtagagcagcttatctcgcgcatgaaagagaatggtcagctacgttttcgcgtggcgctgggcaattactttaccgggccgggcagtattgcacgctcataccgcacggcgcgcaccacgatgatggtcggcaaacagcgaatgccagagagccgcagctatttttatcaggatttgatgctgccggtcctgttagatagcctgcgtggcggctggcaggccaatgagctggcgcgcccgctggtaaaactcaaagcgatggataacaacgggttattacgtcggacgctgacggcgtggtttcgccataatgtccagccgctggcgacctctaaggcgctgtttattcatcgtaacacgctggaatatcggctaaatcgtatttcggaactgaccgggctggatttgggaaattttgacgatcggctgttgctgtatgtggcgctacaactggatgaacagcgttaagcccggcggcgctacgcttatcaggcctacggggatatatctgtaggccggataaggcgtaacacgtcgccatccggcaacacacagcttacttacgggtaagcttgtccagatcggcttcgatttcactgatcttattcgcgacgacgctttccaggtggcgcaagtcgtcgaggatcttacgtttgagatcgagttctgagcggtcgcgctggcagatttggtccagctcgtcaatcacatagcgtaggttagggctaatctcctgtacctctttataaccctgaccgatgccatcggccaccaccgttttacgctggcgtggatacttaaacttcacgcttttagcaaagaattcacctctatccttttgaaaatagattttcaggatatcgttattggcttcttgccgcaggctgtaacgatcgatttcctcaggattggtaatgcccagactttttagattgtcatacatagcggtatccttcatcacactataacttttgaataattaacgaaaaattggtttttcgccaccagtgtatacaaaaaaagcgcggttgatcgcagaagacgtctcggcaacgtcatgagcaaaagggcggcggttattgatagcttaagtaattcaacgcgatattccgtttatagagaaagcgtttgaagtcagtgtgggaaattgaccggaggcagtggtcgataaccttgagaggcggagtctatgtccggaacgtataatgctactattcgccgggtggtggtttccgcctggataggaaactccattgaatattatgattttctattatacggcctggcaagcgcgctggtatttggcccgcttttttttcctggcgccagcccattgactgcaacgttatcttcttttgccagtttcggcgtgggatttatctcccgaccgctgggcgcgctattttttggcaacaggggagatacgcttgggcgtaaaaacacgttattaattacgttagggggggatgggcgcggtcacgtttctcatcggttgcctgccttcttacgccagtattggcgcgctggcgcctgctttactggttattctgcgttttctacagggatttatggttggaggcgaatggggaggcgccatgttgatggtcgtggaatatgctgctggaaagcaccgggggcggttaagcgcgctatcgcaaacaggaggactcacgggacaattattggcgacaggcgtatttatagtcgtgacccaattaccgcaggaggcgttgttatcgtggggatggcgtattccttttctgctcagtgcgcttttggtgttgcctggattatatatgcgtcatcgtctggatgagacgcctgtcttccgtgcgtttaaaaagcagcaggccattaatcataggcagcaaagagaagaaaggccggtggtcaaagtagtacgagaacaatggcgcagcattttgctgattataattctgcgttttgcggaaagcgttcccttttttcttgctaccgtcttcgcggtttcctgggcgacgacgcagcttgggattgccagcctgactattctgtacattgtaatgttcacctgtctgctggcgtatcccatgcacgtgctatttggcatcatgtcggatcggcgtggctgccgtcaggtgtatattttcggcgcgctttttgtcgcggcaatggcttttccctttttctggctgctggaaagccgttcgctcatactgatgacaatgggctacgttctgcttattaacattggtcataattcactgaatgccgtgcaaccttcttttttcgccggactgtttcatccgcctgtacgctacagcggttcatcaattggcgctcagttgggggcggttgtggcagggggattcacgccgtttatcgctaaagcgttaagcgcagtctatgataacagttgggcgttggttgccggttatgtcgttttgactgcgttggcttcggcgtttgcggcaaagattgcgccggaaaccgtgttaccgcattcgccgtaatgcaaaggggggctgtcgcccccgcttttcactcgcttaatcaatagtgcgcaataattcgttaatgcccactttaccacgcgttttggcgtcgacttttttcacgatcaccgcgcagtacaggctgtacttaccgtcttttgacggcaggttgccggaaacgaccacggagcccgccggtacgcggccatagtgaacttcaccggtttcgcgatcgtagattttggtactctggccgaggtatacgcccatggaaatgacggaaccttcttcgacaatgacgccttccacgacctcagaacgcgcgccaataaagcagttgtcttcaatgatggttgggttagcctgcagcggctccagtacgccgccgatacccacgccgccggaaaggtgaacatttttaccaatctgcgcgcaggaacccaccgtcgcccaggtgtcaaccatggtgccttcgtcaacgtaggcgccgatgttaacgtaagacggcatcagcacggtgttgcgggcgataaatgcgccctgacgaacggccgcaggcggaacgacgcggaagccttctttctgaaaacgcgcttcgtcgtaatcagcgaatttcatcgggactttatcgaagtagcggctttccgcaccgtcgataacctggttatcgttaatacggaaagagagcagaaccgctttcttcaaccactggtgagtgacccactgaccgtcgattttttctgcgacacgcagcgcgccggaatcaagtagagaaatgacctggtttactgcctctcgggtcacggtatctacattaggcggcgtaatatcggcgcggcgctcaaaagcggtctcaataacgttctgtaactgctgcattgttaaactctttcatataaataaacacactaccctttatcgtttggattgagggccgctgtcaaccgttgttgcacctcaagttgcagcacattattaagtgcgcgccgatccgctgtggcgattatgaataaatcttctactcgttcaccaatggttgtaattcgggcgccatgaagcgaaattcccagatcggcaaaaatttgtccgaccctggccagcagaccaggttgatcgagcgcgatcaattccatgaatgattttctgtcggtatgggtgggcagaaaattgacttccgtttcgaccgtaaagtgccgtaactttgccggttgccgacgcggctgcggcggctgccagctacgctgcgtaatggtttgttcaagaccggtgcgaataacgtcatggcgatccgccgccagcgggctgccgtctggttccagaacaataaacgtatccattgccatgccgtcgcgagtggtaaagatctgcgcgtcatggacgcttaaattacgcctgtccagctcggcgcagacggcggcaaacagatagggtctgtccggactccagataaaaatttcggttccaccgcgcgtggcctgcggactgagcaacactaacggttggcgcagatcgtgctgcaataaatggcgtgcgtgccaggcgagctgatttggactatgacgaacaaaatagttagcgcgacagcgggtccagattttgtgcagcgcggcttcatcaatattgtccattcgcagcagcgccagcgcctgaagctgatggtgacgcacgcgctcacgcatatccggcgtattttgcattccacgcctgagctgtttttcagtggcgaagtacagctcgcgcagcaggctctgtttccagctattccacaaggtttcgttggtcgcgcagatgtccgcgacggtcaggcagaccagaaaacgcagccgtgtttcggtttgcacctcttcggcaaactgcttgatgacttccggatcctggatgtcgcggcgctgggcggtgactgacattagcaggtgttggcgcaccagccacgcgaccagttgcgtttcgcgtgagttcaaaccgtgcagttcggcgaaggtgagtacatcctgcgcgcccagtacggaatggtcgccgccgcgtcctttcgcaatatcgtggaacagcgcggcgatcaggatcagttccggatggggaagccgcggccagagatcgacgcatagcggatggcgctggcgcgtctcttctttcgcaaagctctccagtttgagcattacgcggatggtgtgttcatccaccgtgtatgcgtggaacaggtcaaactgcatttgtccgacgatgtgcgaccactgcggcatataagcccacagtacgctgtggcgatgcatgggcagcaggccgcggctgaccgcgccgggatggcgcagcatactcagaaacagagtgcgcgcctccgggatgtaacacagcggttggctcaggtggcggcgggcgtggcgcaagtggcgtaacgtcgtagagtagatgccggtgatcgcgctattgcgcaccatcatataaaacatgcgcaggatcgcttgcggttcgcggataaacagcgtgtcgtcacgcagatcaataagcgtgccgcgcagttgaaactcatcgtcaacaggacgtggtttttcatccgcaggtagcgccagaatcgcctcgtcaaatagctgaagcagcatctgattaagttcgctcacccgacgcgtaacccggaagtagtctttcatcatccgctcaaccggatcattgccctcgccgctgtagttaaggcgttgagcgacgcttaactggcggtcgaacagcaggcggttatcgtagcggctgaccaccagatgtagcgcaaagcgaatgcgccacaggatatgcaggcactcgttgagctccgcgcgctcagcgggggttaaaaagccgaatcccaccatctcatcgagcgaggtagcgccgaagtgacgtcgggcgacccactgtaacgtatggatatcgcgcaggccgccggggctgcttttaatatccggctccagattatagctggtaccgtgatagcgctggtggcgctggttctgctcttctactttggcggcgtaaaatttgtcggacggccaaaaaccttcgctgaaaatatgtttttgcagtgccagaaacagagcgacatcaccgatcagcaggcgcgtttcgatgaggtttgtcgcaacggttaaatcagacagaccttccagcagacactcttccagcgtacgtacgctatgcccgacatccagcttgacgtcccataataaagtcagcagctcgccgaccttttgcgcctgttcatcgggcagctttttgcggcttaaaatgagcagatcaatatcggaaagcggatgcagttcgccgcgtccatagccgccgacagcgaccagcgccagatcggcaatctgaccgaaaccggcctcaatccacaggcgttgcaataactggtcgataaattcggttcgggcttcaataagctgttcagcacaaatgccgctgtcaaatgcctctcccagccagtgttgaaagatgtcgatgcgggctttgataccggcgacggtcagttcagcgcgcggccagacgccagggttttgcggctggtcagggagggtggggagtgcggtattcgcgtgctgttcaggaagagtattcatatgcgccacccattaaaaagccggataatggcgtgaacgccttatccggcctacgtatttatcttcatccttcaagttgcttctacgttggctgcgctcgttcactccagtcacgtacttatgtacgctcctgaagattcactctcttgccgccttgaggcaactcgaatgattttgagtaaaggtgtaatttgtaggcctgataagatgcgaaggcatcgccatcaggcaaaacattattcgtcgtgtgtgatgatcgccgggatggtgtcatctttacgcagcgtcagaatttcacagccgttttccgttaccacaatagtatgctcgtactgagcagacaagctgcgatctttggttttcaccgtccagccgtctttcatggtgcggatacggtaatccccggcgttcagcatcggttcaatggtaaaggtcatgccaggctgcaacacgacgccgccatcgtctgcatcataatgcagcacctgcggttcttcatggaagccgcgaccaataccgtgtccgcagtattcacgtaccacggagaaaccttcgccttcggcatatttctggatggcggcgccaatggtgcgcaggcggatgcccggtttcaccattttgatgcccagatacaggctctcttgcgtgacgcggcacagacgctcgccgagaatggtcggtttgccgacgataaacatcttcgaggtatcgccgtggaattcatctttaatcacggtcacgtcgatgttgacgatatcaccatctttcagatgtttagcgtcatccggaatgccgtggcacaccacttcattaatagagatacagacggatttcggataaccgtgatagccgaggcaggcggagatcgcgtgttgttcgttaacgatgtaatcgttacagatacggtccagttcgccggtggtgacgcccggtttgatatacggttcgatcatttccagcacttcggctgccagacggcccgcgacgcgcattttttcgatgtcttcagatgtcttgatagagatagccatgaattctgtccatcagtgccgatgatttcggcaataattgtgtaagtgctgacaatggtatcagtcaggggtgtaccctgccaaattgagaatcattctgaacttcgcctttcgtgccacaggtgcgttggcgacattttttcaccccagtcactgactggccgtaagctcccggggatgcaaaaatttgctgcctgcctgtaacacgaaattcatcgttcaattcagcactgagtgccaacaattattggtgtcggtggcgtatttgtggtataaagcgcgccggacttccgatccattcgaagactacacacgatggacgggagcgacaaatctcactttgtgtaacaacacacacgtatcggcacatattccggggtgccctttggggtcggtaatatgggatacgtggaggcataaccccaacttaatctatagaggttttaaatcatggcaactgtttccatgcgcgacatgctcaaggctggtgttcactttggtcaccagacccgttactggaacccgaaaatgaagcctttcatcttcggcgcgcgtaacaaagttcacatcatcaaccttgagaaaactgtaccgatgttcaacgaagctctggctgaactgaacaagatctctgctcgtaaaggtaaaatccttttcgttggtactaaacgcgctgcaagcgaagcggtgaaagaagctgctaacagctgcgaccagttcttcgtgaaccatcgctggctgggcggtatgctgactaactggaaaacagttcgtcagtccatcaaacgtctgaaagacctggaaactcagtctcaggacggtactttcgaaaagctgaccaagaaagaagcgctgatgcgtactcgtgagcttgagaaactggaaaacagcctgggcggtatcaaagacatgggcggtctgccggacgctctgttcgttatcgatgctgaccacgagcacattgctatcaaagaagcgaacaacctgggtatcccggtatttgctatcgttgataccaactctgatccggatggcgttgacttcgttatcccgggtaacgatgacgcaatccgtgctgttagcctgtacctgggcgctgtcgctgcaaccgttcgtgaaggccgttctcaggatctggcttcccaggcggaagaaagcttcgtagaagccgagtaataaggcttgataactccctaaaatagttcgagttgcaggaaggcggcaagctcgagaattcccgggagcttacatcagtaagtgaccgggatgagcgagtgaaggcaacgcgcctgcggctcgaaatatgaaggggagagcccttatagaccaggtagtatcacgtttggttagggggcctgtatatggccccctttttcacttttatatctgtgcggtttgatgccgggcagatcaaatctttcgaggattttagaatggctgaaataaccgcatccctggtaaaagagctgcgtgagcgtaccggcgcaggcatgatggattgcaaaaaagcgctgactgaagcgaatggcgacattgagctggcaatcgaaaacatgcgtaagtccggcgctatcaaagcggcgaaaaaagcaggcaacgtggctgctgacggcgtaatcaaaaccaaaatcgacggcaacgtcgctttcattctggaagttaactgccagactgacttcgtggctaaagatgctggcttccaggcatttgctgacaaagtgctggacgccgctgttgctggcaaaatcactgacgtagaagttctgaaagcacagttcgaagaagagcgcgttgctctggtagcgaaaattggcgagaacatcaacattcgtcgcgtcgcttccctggaaggcgacgttctgggttcttaccagcacggtgcgcgcatcggcgttctggttgccgctaaaggcgctgacgaagagctggttaaacagctggcgatgcacgttgcggcaagcaagccggaattcgttaagccggaagacgtgtctgctgacgtggtagagaaagagtaccaggtacagctggacatcgcgatgcagtccggtaagccgaaagaaatcgcagagaaaatggttgaaggccgcatgaagaaattcaccggcgaagtttctctgactggtcagcctttcgtcatggaaccgagcaaatctgttggccaactgctgaaagagcacaacgctgacgtgactggcttcatccgctttgaagtgggcgaaggcattgagaaagtcgagactgactttgcagcagaagttgctgcgatgtctaagcagtcctgattttcctgaggagccgcctgagggcggcttctttttgcgcctctcttgtaaaatcagccgacgcctggcgtctgcgctgaaatgcgacgtacaatgtcgccggaattaactcatatcaatcgttgacagtctcaggaaagaaacatggctaccaatgcaaaacccgtctataaacgcattctgcttaaattaagcggcgaagctctgcagggtacggaaggcttcggtattgatgcaagcatactggatcgtatggctcaggagatcaaagaactggttgaactgggtattcaggttggtgtggtgattggcggtggtaacctgttccgtggcgcgggtctggcaaaagcggggatgaaccgcgttgtgggcgaccacatgggcatgttggccaccgtcatgaacggcctggcaatgcgtgatgcgcttcaccgcgcctatgtgaacgcccgcctgatgtcggcaattcctttaaacggcgtgtgcgacaactacagttgggccgaggcgattagcctgctgcgtaataaccgtgttgtgattctgtctgcaggtacgggtaacccgttcttcactaccgactctgcggcttgtctgcgcgggatcgaaattgaagcggatgtcgtactgaaagcgaccaaagtggatggcgtattcactgccgatccggcaaaagatccttccgcgaccatgtacgatcagctgacctacagcgaagtgctggataaagagctgaaagtgatggatctggcggcgttcacgctggctcgtgaccacaaactgccgattcgtgttttcaacatgaacaaaccgggcgcgctgcgtcgtgtggtgatgggcgaaaaagaagggacgttaatcacggaataattcccgtgagcgccaaatacgggtaagattctgttctattgacgggtcttattacctggcagaaattaaacgagactatacttagcacatctttatattgtgtgaccgtctggtctgactgagactagttttcaaggattcgtaacgtgattagcgatatcagaaaagatgctgaagtacgcatggaaaaatgcgttgaagcgttcaaaacccaaatcagcaaagtgcgcacgggtcgtgcttctcccagcctgctggatggtattgtcgtagaatactatggcactccgaccccgctgcgccagttggcaagcgtaacggtagaagactcccgtaccttaaaaattaacgtgtttgaccgttctatggggccagccgttgaaaaagcgatcatggcgtcagacctcggtttgaatccaagctctgcgggcaccgacattcgcgttccgctgccgccgctgaccgaagaacgtcgtaaagatctgacgaaaattgtccgtggcgaagcggagcaggcgcgtgtcgccgttcgtaacgtccgtcgtgatgcgaacgataaagtaaaagctctgctgaaagataaagcgatcagtgaagatgacgatcgtcgctctcaggaagaagtacagaaaatgaccgacgcggcaattaagaaagttgatgcggcgttggcagataaagaagcagaactgatgcagttctgattgatctgtacgcagatataaactcattccaccgctaacctggcggatgagtggtgtacaaagcgccgcgcagaagacattatcaggtctcctgtgcggcgttttgctttttattccgtttcaacacttctggacgtttcatgaagcaattaaccattctgggctcgaccggctctattggttgcagcacactggacgtggtgcgccataatcctgatagcttccgcgttatcgcgctggtggcgggtaaaaatgtcgcccgcatggcggagcagtgcctggagttctcgccgcgttatgccgtgatggacgatacgtcgagcgcagaacagctcaaaataatgcttcagcagcatggcagccgcaccgaggttctgagcggtcagcaggctgcctgtgagatggcggcgcttgatgaggtcgggcatgtgatggcggccattgtgggcgcggctggtttactgccgaccctggcggcgattcgcgcagggaagacgattctgctggcgaataaagaatcgctggtgacctgcgggcggctgtttatggacgaagtaaaacgcagcaacgcccggcttttacccgtcgatagcgaacataacgcgatttttcagagtttgccgcaatctattcagcataatctgggatacgctgaccttgagcaaaatggcgtaacgtcgattttgcttaccgggtctggtggcccgtttcgtgaaacgcccatgtgcgatctggcagcgatgacgccggatcaggcatgtcgtcatccgaactggtcgatggggcgaaaaatctccgtcgactccgccaccatgatgaataaaggtctggaatacattgaagcgcgttggttatttaatgccagcgcacgtcagatggaagtgttgatccatccgcaatcggtcattcattcgatggtgcgttatcaggacggcagcgtcctggcgcagcttggagaacctgacatgcgtacgcctattgcgcatacgatggcatggccgaatcgcgtcacgtccggcgcgcagccgctcgatttttgcaaactcagcgcgctgacgtttagcgcgccagattatcagcgttatccttgcctgaagctggcgatggaggcgtttgagcaaggtcaggcggcaacgacggcgctcaatgcggcaaacgaaatcaccgttgccgcgtttctggcgcaacagattcgttttaccgatatcgccgggctcaatttagcggtgctggagaggatggatttacaggaaccggcaagcgttgaggacgtattgcaggttgacgccatcgcgcgtgaagtagccagaaaacaagtgatacggctctcacgctgacgattatcccgcgacagaagatcgtgctatttgttagcgttgggcttcggtgatatagtctgcgccacctgatcgcaggtttttggcttttttcggtcaggttagccgtggttttacacggcttttttgtggatacacaaaatcattcaggacgcatcgggacggcaggcgagtacgttcccggcgtgcgcagacagcgcacgacaggggcgatgacgcgcggtcatccgcgaagcgaaccgaagagaatgtgtataaaggcttcagtattcctgagtaccgctaaatcctttcagggacaaaaaacgcgttatgttgtctgcaactcaaccagtaagcgaaaatttgccagcgcatggctgccgtcatgttgcaataattatggatggcaatggtcgctgggcgaaaaagcaagggaagatccgggcctttgggcataaagccggggcgaagtccgtccggcgagcggtctcttttgctgccaataacggtattgatgcgttaacgctgtatgcctttagtagtgaaaactggaaccgaccggcgcaggaagtgagcgcgttaatggagctgtttgtgtgggcgctggatagcgaagtcaaaagcctgcaccgccataacgttcgcctgcgtattatcggcgatatcagtcgattcaactcacgtttacaagaacgtattcgcaaatcagaagcgcttaccgcccataatacgggtctaacgctgaatatcgctgcgaattacggcggacgttgggatattgtccagggagtccgacaactggcggaacaggtgcaggctggagtgctgcgccccgatcagattgatgaagagagactaggccagcaaatctgtatgcatgagctggcgcctgtggatttagtaattaggactgggggagagcatcgcattagtaactttttgctttggcaaattgcctatgccgaactttactttacggatgttctttggcccgatttcgatgaacaagactttgaaggtgcgctgcatgcctttgctaatcgagagcgtcgtttcggcggtaccgagcctggtgatgacaaagcctgatgggggttgcttttgctgaagtatcgcctgatttctgcttttgtgttaatacccgcggtcatcgctgcgctttttttattgccgccggtggggttcgccattattacgctggttgtctgtatgctggccgcgtgggaatggggacagttaagcggtttcgccgcgcgttcacagcgggtttggctggcggtgctgtgtggtctgttattggcgctgatgctatttttgttgcctgagtatcatcacaacattcgtcaaccgctggttgagatgtcgctttgggcatcgttaggatggtgggttgtcgcgctactgctggtgctattttatcccggttcggcggcaatctggcgcaactcaaaaacattgcgtctcattttcggtttgttaactattgtgccatttttctggggcatgctggcgctgcgcgcctggcactatgacgagaatcattacagtggcgcaatatggctactctatgtcatgatcctggtctggggagcggactctggcgcgtatatgtttggtaaattatttggcaaacataagctggcgccgaaggtttccccgggtaaaacctggcaagggtttatcggcgggcttgctacggctgccgtgatctcatggggctacggtatgtgggcgaatctgaatgttgcgcctgttatcttgctgatttgctctgtggtggcggctctggcttctgtactgggcgacctcaccgagagtatgtttaagcgcgaagcaggaattaaggatagcggccacttgattccaggccatggcggcattctggaccgaattgacagtctgacggctgccgtaccggtctttgcttgcctgttgttactggtgttcaggacgctctaacggaaggttttatgctgagtattctctggaatctggctgcattcatcatcgcactgggcgtgctgatcactgtgcatgaatttggtcatttctgggttgcccggcgctgcggtgtgcgagttgagcgcttttccatcggttttggcaaagcgctctggcgtcgtaccgatcggtacggcaccgagtatgtcatcgccctgatcccgctgggcggctacgtcaaaatgctggatgagcgcgccgaaccggtagcgccggaattgcgtcgtcacgccttcaataacaaaacggtgggccagcgcgccgcaattattgccgcaggtccggttgcgaacttcatttttgctatctttgcttactggctggtctttatcatcggcgtccctggcgttcgtccggtcattggcgaaataacgcccaactcgattgctgcgcaggcgcaaattgcgcctggtacggaacttaaagccgttgatggtatcgaaacccctgattgggatgccgtgcgtttacaactggtgtccaaaattggcgatcagcagacgacggtgagcgtcgcgccgtttggtagcgaccagcggcaggataaaacgcttgatttacgtcactgggcatttgagcctgataagcaagatcctgtatcttctttagggattcggccccgcgggccacagattgaaccggtactgtcagaagtgcaggcgaattccgcagccagtaaagcgggtttgcaagcaggcgacaggatcgttaaagtcgatggtcagccgttaacgcagtggatgaaattcgtgacgtttgtacgcgataatcccggtaagccgttagcgttagagattgaaaggcaggggagcgccttgtcgttgacgttaacgccggatacgaaatcggttaacggaaaggcggaagggtttgcaggcgtggtgcctaaaattattcctctgccggaagagtacaagactatacgccagtatgggccttttagcgccatcctcgaagccacggataagacgtggcagttgatgaagctgacggtcagtatgctgggtaaattgataaccggtgatgtgaaactgaacaacctcagtgggccgatttctatcgctcagggggctgggatgtcagcggagttcggggtgatttattacctgatgttccttgcgctaatcagcgtgaacttagggataattaacctgtttccgctgcccgttcttgacggggggcatctgctgttcctggcgattgaaaagcttaagggcgggccggtatccgagcgggttcaagactttagttatcgcattggctcgattttgctggtgttgttaatggggcttgcacttttcaatgatttctctcggttgtaagagagttagttaggaagaacgcataataacgatggcgatgaaaaagttgctcatagcgtcgctgctgttcagcagcgccaccgtatacggtgctgaagggttcgtagtgaaggacattcatttcgaaggcctgcagcgagtcgccgttggtgcggctctcctcagtatgccggtgcgcacaggcgacacggttaatgatgaagatatcagtaacaccattcgcgctctgttcgccaccggcaactttgaggacgtccgcgtcctgcgcgatggtaatacccttctggttcaggtaaaagaacgtccgaccattgccagcatcactttctccgggaacaagtcggtgaaagatgacatgctcaagcaaaacctcgaagcgtctggcgtacgtgttggcgagtctctggatcgcaccacgttgtctgatatcgaaaaaggtctggaagacttttactatagcgtaggtaaatacagcgccagcgttaaggcggtcgtcacgccgctaccgcgcaaccgtgttgatcttaaactggtgttccaggagggcgtatcggcgaagatccaacagatcaacatcgtcggtaaccatgcctttagcaccgaagaactcatttctcatttccagttgcgtgacgaagtgccgtggtggaacgtcgtcggcgatcgtaaataccagaaacagaagctggcgggcgaccttgaaaccttgcgcagctactatctggatcgcggctacgcgcgtttcaatattgactccacgcaagtgagtctgacgccggataagaaagggatctacatcaccgtcaatatcaccgaaggcgatcagtacaagctttccggggttcaggtgagcggtaacctggccggacattccgctgaaattgagaacctgacgaaaattgaaccgggcgagctctataacggcaccaaagtgaccaaaatggaagatgacatcaaaaagcttctgggtcgctatggttacgcctatccgcgcgtgcagtcacagcctgaaattaacgatgctgacaaaaccgtaaaactgcgcgtaaacgtcgatgcgggcaaccgtttctacgtgcgtaagatccgctttgaaggcaacgacacctcaaaagattccgttctgcgccgtgaaatgcgccagatggaaggggcgtggctgggcagcgacctggttgaccaggggaaagagcgtctgaaccgtctcggcttctttgaaaccgtcgacaccgacacgcagcgcgttccgggtagcccggatcaggttgatgtggtgtacaaggtgaaagagcgcaacaccggtagctttaacttcggtatcggttacggtacagaaagcggcgttagcttccaggccggcgttcagcaggacaactggttaggtaccggttattccgtggggattaacggcaccaaaaacgactaccagacctacagcgaactgtccgttactaacccatactttaccgttgacggcgtgagcctcggtggtcgtatcttctataacgacttccaggcggacgacgcggatctatccgactataccaacaagagttacggtacggatgtgacgcttggcttccccatcaacgagtacaacacgttgcgtgctggtctgggttatgtccataacaaactgtccaacatgcagccgcagatcgcgatggatcgttatcttgagtcgatgggacaatctgctgataccagcagttttgccgctgatgacttcacctttaactacggctggacctataacaaacttgaccgtggttatttcccgacggacggttcgcgcgtcaatctgacggggaaagtgacgattccaggttccgacaacgaatactacaaagtgtcgctggataccgcgacctatgtgcctatcgataacgatcacaagtgggtggttctggggcgtactcgctggggttacggcgatggtttaggcggcaaggaaatgccgttctatgagaacttctatgccggtggttccagtaccgtgcgtggtttccagtcgaatactatcggcccgaaagcggtctataaaaatggcgcccatactagttgggacgataatgatgattacgaagactgtactcaggaatcaggctgtaaatcagatgatgcggtaggtggtaatgccatggctgtcgccagcctggaatttattaccccgacgccgttcatcagcgaaaagtatgccaactcggttcgtacctccttcttctgggatatgggtaccgtttgggatacgaactgggatccgtcatctgcgccgtcagatgtaccggattacagcgatccaggcaacatccgtatgtccgcgggtatcgcattacaatggatgtccccattggggccgttggtcttctcctacgcccagccgtttaaaaagtacgatggagacaaagccgagcagttccagtttaacattggtaaaacctggtaattgttcactgcaaaggaatgcattggtagtgtagcgatgacttttggcgatgcccccagggatcgccaggccacgcaaagagctgtaccttcgggtgcaaatgggatggtaaggagtttattgtgaaaaagtggttattagctgcaggtcttggtttggcgatggtaacgtccgcacaggctgctgacaaaattgcaatcgtcaacatgggtaatctgttccaacaggttgcgcagaagacgggtgtatccaatacactggaaaacgaatttaaaggccgtgcggctgaactgcaaaaaatggaaaccgatctgcaatctaaaatgcagcgtctgcaatccatgaaagcaggtagcgatcgtactaagctggaaaaagacgtgatgtctcagcgccagactttcgcacaaaaagcgcaggcttttgagaaagatcgcgctcgtcgttccaacgaagaacgcaacaaactggtgactcgtatccagactgcggtgaaaaaagtggctaacgaccagagtatcgatctggtggtagacgcaaacaccgttgcttacaacagcagcgatgtgaaagacatcaccgctgacgtactgaaacaggttaaataagtaatgccttcaattcgactggctgacttagcagaacagttggatgcagaattacacggtgatggcgatatcgtcatcaccggcgttgcgtccatgcaatctgcaacaacaggccacattacgtttatggtgaatcctaagtaccgtgaacacttaggtttatgccaggcttctgcggttgtcatgacgcaggacgatcttccttttgctaagagtgcggcgctggtagttaaaaatccctacctgacctacgcgcgcatggcgcaaattttagatactacgccgcagcccgcgcagaatatcgcgccaagcgccgtgattgatgcgacggcaacgctgggtagcaatgtttcagtcggcgcgaatgcggtgattgaatctggcgtacaactgggcgataacgtggttatcggcgcaggctgtttcgtcggaaaaaatagcaaaatcggggcgggttcacgcttgtgggcgaacgtaacgatttaccacgacattcagatcggtgagaattgcctgatccagtccagtacggtgatcggcgcggacggttttggctacgctaacgatcgtggcaactgggtgaagatcccacaactgggccgggtcattattggcgatcgtgtcgagatcggcgcttgtaccaccattgaccgtggcgcgttggatgatactgttattggcaatggcgtgattattgataatcagtgccagattgcacataacgtcgtgattggcgacaatacggcagttgccggtggcgtcattatggcgggtagcctgaagattggccgttactgcatgattggcggcgccagcgtgatcaatgggcatatggaaatatgcgacaaagtcacggtaactggcatgggtatggtgatgcgtcccatcacggaaccgggcgtctactcctcaggcattccgctgcaacccaacaaagtatggcgtaaaactgctgcactggtgatgaacattgatgatatgagcaagcgtctcaaagcgattgagcgcaaggttaatcaacaagactaacgttccgccttgtagttgccattcttttccggcctgtcacattcatacgattgcggcaggccgtgttattattgcctttttgtatatttggacaggaagagtattttgactactaacactcatactctgcagattgaagagattttagagcttctgccgcaccgttttccgtttttactggtcgatcgcgtgctggactttgaagaaggtcgttttctgcgtgcggtgaaaaatgtctccgtcaacgagccgtttttccaggggcatttcccgggcaaaccgattttgccaggcgtgctgattctggaagcgatggcgcaggcaaccggtattctggcgtttaaaagcgttggtaaactggaacctggcgaactgtattatttcgcgggtattgatgaagcgcgctttaagcgtccggtggtgccaggcgatcagatgatcatggaagtcactttcgagaaaacgcgccgtggcctgacccgctttaaaggggttgcgctggtcgacggtaaagtcgtgtgcgaagcaaccatgatgtgtgctcgtagccgggaggcctgattcgtgattgataaatccgcctttattcatcctaccgccattgtggaagacggcgctgtaattggcgctaatgcccacattggtcccttttgtattgttgggccgcaggtcgaaattggtgagggaaccgtactgaagtctcatgtggtcgtgaatggtcaaaccaaaatcggccgcgacaacgagatttatcagtttgcctccatcggtgaagtgaaccaggatctgaaatatgcgggtgagccgacccgtgtggaaattggcgatcgtaaccgcatccgcgaaagcgtcaccattcatcgtggtacagtgcagggcggtgggttgacgaaggtgggtagcgataacctgctgatgatcaatgcgcatgtcgcacatgattgtacggtaggtaatcgctgtatcctcgccaacaacgccacgctggcggggcacgtatcagtcgatgattttgcgatcatcggcggtatgacggcagttcatcaattctgcattatcggtgcgcatgtgatggtcggcggctgctccggcgtggcgcaggatgtccctccgtatgtgattgcgcagggtaaccatgcgacgccgttcggggtaaatatcgaagggctgaagcgtcgcggctttagccgtgaagggctggtggcgattcgtaatgcctacaaactgttgtaccgcagtggtaaaacgctcgacgaagcgaagctggaaatcgctgaacttgctgaaaagcatccggaagtgaaggcgtttaccgagttctttgagcgttcaacgcgcggtccgattcgttaatggcggcacagcgtcctttaacgattgccctggtcgccggtgaaacgtccggcgatattcttggcgcaggcttaattcgtgcgctgaaagcgcgcgtacccaacgcccgttttgtgggcgttgcggggccgcgtatgcaggccgaagggtgtgaagcctggtacgagatggaagagctggcggtcatgggcattgttgaagtgctcggacgtttacgccgtttgttgcatatccgcgccgatctgacccgccgttttaccgaactcaagcccgatgtctttgtcgggattgatgcccctgatttcaatattaccctcgaaggtaatctgaaaaaaaaagggattaagaccattcattatgtcagcccgtccgtttgggcctggcgacagaaacgcgttttcaaaataggcagatccacccatatggtgttggcttttctgcctttcgaaaaagcgttttacgataaatttaacgtcccgtgccgctttatcggtcacaccatggcggatgccatgccgctggacccggataaaaatgcggcgcgcgacgtgctgggtatcccgcatgacgcccattgtctggcgctactgccaggcagccgtggcgcggaagtggaaatgctcagcgccgatttcctgaaaaccgcacaattgctgcgacagcgctatcccgatctggaagtggtagtgccgctggtgaacgcgaaacgccgcgagcagtttgaaaaaattaaagcggaggttgcgccggatctcgccgttcatttgctggacggcatggcgcgcgaggcgatgatcgccagcgacgcggctctgctggcctcgggtacggcggcactggagtgtatgctggcaaaatgcccgatggtagtgggatatcgtatgaagcccttcactttctggctggcgaaacgtctggtgaaaacggagtatgtgtctttgcctaacctgctggcgggaagagaattagtcaaagagctgttgcaggaagagtgcgaaccgcaaaaactcgccgaagcgctgttgccgctactggcgaacggtaaaaccagccatgcgatgcacgacaccttccgtgaattgcatcagcagatccgctgtaatgccgatgagcaggcggcagatgccgtcctggagttagcacaatgatcgaatttgtttatccacacacccatttagtggcgggtgtggatgaagtgggccgtggcccgctggtgggcgccgtagtgaccgccgccgtgatcctcgatccggcgcgtccgatcgtcggtctgaatgattccaaaaaattgtctgaaaagcgtcgtctgtcattgtatgacgagattaaagaaaaggcgttaagctggagtctggggcgcgcggaagcgcatgaaattgatgagctgaatattttgcacgccaccatgctcgccatgcagcgcgctgtcgctggtctgcatattgcgccagaatatgtgctgatcgacggcaatcgctgtccggagctgcctgtgccgtcaatggccgtggtgaaaggcgacagccgcgtggcggagattagcgcggcgtctattctggcgaaagtcacccgcgacgcagaaatggcggcgctggatatcgtttttcctcagtatggctttgcgcagcacaaaggctatccaaccgcttttcatctggaaaagttggcccagtatggcgcgacggcgcaccaccgacgcagttttgcgcctgttaaacgcgctctgggacttgtgtcctgattcttgtatcgagaaatctgaagatgtctgaaccacgtttcgttcacctgcgggtgcacagcgactactctatgatcgatgggctggcgaagaccgggccgctggtgaaaaaggcggcctcattaggtatgcctgcgctggcgatcaccgattttaccaacctctgcggtctggtgaagttctacggagcgggtcatggcgcgggcattaaacccatcgtcggggcggactttaacgttcacaacgaactgctgggagatgagctgactcatctgacggtactggcggcgaataatacgggataccagaacttgacgttgctgatctcgaaagcgtatcagcgcggctacggcgcggcaggcccgattatcgagcgcgactggctggtagagcttaaagaaggtttgatcctgctttccggcgggcgcatgggcgacgtaggccgctgtctgctacgcggcaaccaggcgctggtggaggagtgcgttgctttctatgaagcgcattttcccgatcgctacttcctggaactgatccgtaccggcagacaggatgaagagacctatctccatgctgcggttgagctggctgaggcacgtggtttgccggttgtcgcgacaaacgatgtccgttttcttgaaagcgatgattttgacgcccatgagattcgtgtcgcgatccacgacggtttcacgctcgacgatcctaaacgtccacgcaattattcaccgcagcagtatatgcgcagtgaagaagaaatgtgcgagctgttctccgatattccggaggcgctggaaaatacggtggagattgccaaacgctgcaacgtaacggtgcgtctgggtgaatatttcttgccgcagttcccgaccggcgatatgaccaccgaagattatctggtcaaaaaagcgaaagaggggctggaagagcgtctggctttcctgtttccggacgaagaagagcgcaaaaagcgtcgcccggaatatgacgagcgtctggatattgaactacaggttatcaaccagatggggttccctggctacttcctcatcgtgatggagtttatccagtggtcaaaagataacggcgtgccggtagggccgggacgtggttccggggctggttcgctggtggcctacgcgctgaaaattaccgaccttgatccgctggaatttgacctgctgttcgaacgtttcctgaacccggaacgtgtctcgatgcctgacttcgacgttgacttctgtatggagaaacgcgaccaggtgattgaacacgtcgcagatatgtacgggcgtgatgcggtatcgcaaattatcaccttcggtacgatggcggcgaaagccgttatccgcgatgtgggccgcgtgctggggcatccgtacggttttgtcgatcgtatctcgaagctggtgccgcccgatccgggcatgacgctggcaaaagcctttgaagcggaaccgcaactgccggaaatttacgaggcggatgaagaggtcagagcgctgatcgatatggcgcgtaagctcgaaggcgtcacgcgtaacgccggtaagcacgctggcggcgtggtcatcgcgccgaccaaaattaccgactttgcgccgctgtactgcgatgaagagggcaagcatccggttacccagtttgataaaagcgacgtggaatatgccgggctggtgaagttcgacttcctcggtttgcgtacgctgactatcatcaactgggcgctggagatgatcaacaagcggcgggcgaagaatggcgagccaccgctggatatcgctgccattccgctggacgataaaaaaagcttcgacatgctgcagcgctcggaaaccacggcggtcttccagcttgaatcgcgcggcatgaaagatctgatcaaacgtctgcagccggactgctttgaagatatgatcgcgctggtggccctgttccgtcccggcccgttgcagtcagggatggtagataacttcatcgaccgtaagcacggtcgtgaagaactctcttacccggacgttcagtggcagcatgaaagcctgaagccggtactggagccgacctacggcatcattctgtatcaggaacaggtgatgcagattgcccaggtactttccgggtatactctcggcggcgcggatatgctgcgtcgtgcgatgggtaagaaaaagccggaggagatggccaaacagcgttccgtttttgaagaaggcgcgaaaaagaacggtatcgacggcgaactggcgatgaaaatctttgacctggtggagaaattcgccggttacgggtttaacaaatcgcactccgccgcttatgcgctggtttcttaccagacgctatggctaaaggcgcactatccggcagagtttatggcggcggtgatgactgccgatatggacaacaccgagaaggtcgtcggcctggtggacgagtgctggcggatgggactgaaaattctgccgccggatattaactccgggttgtaccatttccacgttaatgatgagggcgagatcgtctacggtattggcgcgatcaaaggcgtcggcgaaggtccgatcgaagcgatcatcgacgcgcgtaatcagggcggctatttccgcgagctgtttgatctgtgcgcgcggaccgacaccaaaaagctcaaccgccgggtgctggaaaagctgatcatgtccggggcgttcgaccgcctggggccgcaccgcgccgcgctgatgaactcattgggcgatgcgctgaaagccgccgaccagcacgccaaagcggaagctatcggtcagacggatatgttcggcgtgctggcggaagagccggagcaaatcgaacaatcctatgccagctgccagccgtggccggagcaggtggtgttagatggggaacgtgaaacgttggggctgtacctgacgggccaccctatcaatcagtatttaaaagaaattgagcgctatgtcggcggggtaaggctcaaagacatgcatccgacagaacgtggtaaagtcaccacggctgcggggctcgtgattgccgcaagggttatggtcaccaagcgcggcaatcgtatcggcatctgtacgctggatgaccgttccgggcgtctggaagtgatgttatttaccgacgcgctggataaataccagcagttgctggaaaaagaccgcatacttatcgtcagcggacaggtcagctttgatgacttcagcggggggcttaaaatgaccgcccgcgaagtgatggatattgacgaagctcgcgaaaaatacgctcgcgggcttgctatctcgctgacggacaggcaaattgatgaccagcttttaaaccgactccgtcagtctctggaaccccaccgctcggggaccattccagtacatctctactatcagagggcggatgcgcgtgcgcggctgcgttttggcgcaacgtggcgtgtctctccgagcgatcgtttacttaacgatctgcgtggcctcattggttcggagcaggtggaactggagtttgactaatacaggaatactatgagtctgaatttccttgattttgaacagccgatagcagagctggaagcgaaaatcgattctctgactgcggtaagccgccaggatgagaaactggatattaatatcgatgaagaagtccatcgcctgcgcgaaaaaagcgtagaactgacgcgcaaaatcttcgccgatctcggcgcatggcaggtagcccaactggcgcgccatccgcagcgtccgtacaccctggattatgtccgtctggcgtttgatgagtttgatgagctggcgggcgatcgcgcctatgctgatgacaaagccatcgtcggcggtatcgcgcgtctggaagggcgaccggtgatgatcattggtcatcagaaaggtcgtgaaaccaaagaaaaaattcgtcgtaactttggcatgccagcgccggaaggctaccgcaaagcgctgcgcctgatggaaatggctgaacgcttcaacatgccgattatcaccttcatcgacaccccgggtgcataccctggcgtgggcgcggaagagcgtggtcagtctgaagccatcgcccgcaacctgcgtgagatgtctcgtctgaacgtaccggtcatctgcaccgtgattggcgaaggcggctccggcggcgcattggcgattggcgtgggtgataaagtgaatatgctgcaatacagcacctattccgttatctccccggaaggttgcgcctctattttgtggaagagcgccgacaaagcaccattggctgctgaagcgatgggcatcatcgcgccgcgtctgaaagagctgaagctaatcgattccatcattccggagccgctgggcggcgcgcaccgtaatccggaagcgatggcggcatcgctaaaagcgcagctgctggaagatttagccgatctcgatgtgttaagcaccgatgatttaaaaaaccgtcgttaccagcgtttgatgagctacggttacgcctaatcatttacctcatttttccccaagaggccggataatccggcctctttttttggtcgaggaaaaatgagacgccgatgagttgatgtgattaaacgcaacggcatgttctccctgacactgtatcaactgccaggcgtgtggccagggcaggcagtgaactacccttcaaggagaaaattatgggattgcaaaaaacactggcgctcagcgccgtagcggcagggatcatgttgagcttatccggtgcgcaggccgcgccgctgcttagcagtagtgagccaatgaccattaacgccagcgatctggcggcgaaagagaaagcgctaacggattttccgttaatggaggccgtgaaatcctctattcagacgttggataacagcgcggtcgaacaaatcgaaccggggcgcgccgctaacccggcaaacgtaaaacgcgttgaaagtattctgaaagaggccgactgggattatctgttcccgatgcgcgcgccggaatatacttactctaacttcctgaaagcgataggtaaattcccggcggtttgtggtacctacaccgatggacgcgatagcgacgctatctgccgtaaaaccctggctactatgtttgcgcattttgcccaggagacgggcggtcacgaaagctggcgtgacattccggaatggcgtcaggcgctggtctatctgcgcgaagtcggctggacagaagggcagaaaggcggctacaacggcgaatgtaacccggatgtatggcagggccagacctggccgtgcggtaaagataaggacggcgatttcctcagctattttggccgcggggcaaaacagctttcttataactacaactatgggcctttctctgacgcgatgtatggcgacgttcgccctctgctggataaacccgagctggtggcggatacctggatgaacctggcgagcgccgtcttcttctttgtgtatccgcagccgccgaagccgtctatgctacatgtgattgacggtacctggcagccaaacgatcgcgataaagcaaacggcctggtatcaggtttcggcgtcactattcagatcatcaatggcggcgtggagtgcggcggcgcagatgagaatgcgcagtcgcttaaccgcatcgcctactacaaagagtttgccaactacctgaaagtgccggtgccggcggacgaagtgttgggctgtaaaaagatgaagcagttcgatgaaggcggcgctggcgcgttaccgatctattgggaacaagactggggctggagcgccgatactgcggacggtaaaacctattcctgccagttagtgggatatcagacgccgtataccgcctttaaagagggcgactacacgaaatgtgtacagcattatttcaacgttaatgtcgtcgatgataacggaaccactgaaccggatgtcacgccaactccggcgccagtgacggatgaaaacgtggcgccagtcgcgcgcattgccggaccggtcggggcggtggaagccggtagcccggtttcactcagcgcggaaggatcgaccgacgcgaatggcgacaagctcacctatacctggatgtcgcaggatggcaaaacgctgagcggccaggataaagccgttgtgattttcaacgcgccggatgtcactcagaacacccagtatgtggtgaatctgaccgttagcgacggtacgctctccagtacagcggtttatacgctgaatgtgaaagcgaaggccgccgctgcggatgacgaagataagaccaccagctaccctgcctggagcagcagccagaaatggaatccgggcgacatcgtcaacagtaatggcgcattgtaccagtgcaaaccgttcccggaaggctcatggtgtaatgttgcgcctgcctactatgagcccggcgtagggattgcctgggccgatgcatggaacgcattgtaataagataaatcctgtcggtgctttgcatcggcaggattgttactatgcttatctcaggttttttcaggagaaagcatgaacatcatcgccattatggggccgcacggggtttattataaagatgaacccatcaaggagcttgagcgtgcattacaatccctgggatttcaaattatctggccgcaaaatagcgttgacttgttgaagtttattgaacataacccgcgcatctgcggcgttatttttgactgggatgaatacagtctcgacctttgtagcgaaatcaaccagctaaatgaataccttcctctctacgcctttatcaataccaactccacgctggacgttagcgttcacgatatgcgcatggcgctgtggttttttgagtatgcattggggctggctgaagatatcgcgacgcgcattcatcaatatacaaacgaatatctcgataatattacgccgccgtttaccaaagcgctttttacctacgccaaagaaggaaaatataccttttgtacgccgggtcatatggcgggaacggcgtatcagaaaagcccgccaggctgcctgttttatgacttttttggcggcaataccttaaaagctgatgtgtcgatttcggtgactgaactgggatcgctgctggatcacaccgggccgcatctggaagcggaagagtatatcgcccgtacttttggcgccgagcagagctatatggtgacgaacggtacgtcgacctcgaataaaattgtcggtatgtatgccgcgcctgcgggaagtacgctacttattgatcgtaattgtcataaatcgctggcgcatttgctgatgatgagcgatgtggtgcctctctggttgaagccgacgcgcaatgcgctcggcattctcggcggtattccccgaagggaatttacccgtgcaagcatcgaaagcaagatagaggagacccctcaggcgcaatggccggtgcatgcggttatcaccaattcgacttacgatggtctgctgtataacactaactggatcaagcaaatgctggacgttccctcgatccattttgattccgcttgggtaccctatacccatttccatccgatctaccaggggaaaagcgggatgagcggcgatcgggtgcccggaaaagtgattttcgaaacgcaatccacccataaaatgctggcggctttttcgcaggcgtcgcttattcatatcaaaggggaatatgacgaagagacgtttaacgaagcgtttatgatgcacacttccacatcgccgagctatcccattgtcgcctctatcgagaccgcagcggcgatgctgcgcggcaatccagggaaaagattgattaatcgttcggtggaacgggcgctccattttcgtaaagaggtacagcggctacgtgaagagtccgatagctggttctttgatatctggcagccggaagaggttgatgaggccgaatgctggccggtcacgccgggagaaacctggcatggcttcaccgatgccgatgacgatcatatgttcctcgatccggttaaggtgacaatcctgacgccggggatggatgaacagggcaacatgagcgaagaggggatacccgccgcgctggtggcgaagttccttgatgagcgaggcgtggtggtggaaaaaaccgggccgtataatctgctgtttttgttcagcatagggattgataagacccgtgcgatggggctgctgcgcggactgacggaatttaaacgcgcctacgatcttaacctgcgcgtcaaaaatatgttgccggatctgtatgcggaagatccggatttttatcgcaatatgcgcattcaggatctggcgcaggggatccataaactgatccgccagcacgatcttccggggctgatgctgcgggcgttcgaggttttaccggagatgatcatgaccccgcaccaggcctggcagcgtcagatcaaaggtgaggtggaaaccgtggcgctcgatcaactgccagggcgcgtttccgcgaatatgatcctgccttatccgccaggcgttccgctgttgatgcccggcgagaggatcacgcaacagagtcgggccgtgctcgattttctgctgatgctctgctcgattggccagcattatcccggttttgaaacggatattcacggcgcgaaacggaatgaagacggggtgtaccaggtacgagtcttaaaacacgcctgctagcttgcctgacgggaatgtgacgagtaacgtactgataatcaataaaggagacgctatgctgggattaaaacaggttcatcacatcgcgatcattgcgacagactatgcggtgagcaaggcgttttattgcgatattctggggttcgatctgctaagcgaagtctggcgggaagagcgtgactcgtggaagggcgatttggcgctaaacgggcagtatgtgattgagcttttctcttttcccttccctccggcgcgtccaagccgacctgaagcctgcggcctgcgccatctggctttcagcgtggaaaatgtggaaaacgccgttgcgcatctggaaaagcatcaggttaagtgcgaaccgatacgcatcgatccgtataccgggaagcgctttacttttttcaacgatccggacggtttaccgcttgagctgtatgagcagtaaggcttgtcattaagacgctcgccaggtaacgttgccgggctaagtcactataagcatggatcatgaccactctcacgttgaatacctcgttactctcttctcgccgtattctggctgcctttagcggcggcctggattctacggtgctgttgcatcaactggtgttgtggcgagaacgccatcctgacgtcacgctgcgtgctatccatattcatcacggtttaagccctcatgctgatagctgggtgcggcattgcgaaaccgtatgcgaacgctggcaggttccgctggtagtggagcgggtgacgctggcggataatggcctgggtatcgaggcccatgcgcgtgaagcgcgctaccgggcgttcgcacagacgctattgcctggcgaagtgctggcaaccgcgcagcaccttgacgatcagtgtgaaacgtttctgctggcgttaaagcgcggcagcggtccggccggactttccgcgatgggagaacgctcgccttttgccggaactctgcttcttcgcccgctgttgagagaaacgcggaagacgctggaacagtgggctgtgcgtcatggcttatgctggattgaagatgaaagcaatcaggatgacgcctacgatcgcaattttttacgcctgcgcgcgcttccgctcttacagcagcgctggccgcattttcctgcggcggtagcccgtagtgcgacgctctgcgccgagcaagaaaggctgctggacgagcttctggccagcgatcttactgactgtatcacggcggagggaacattgcggctctctccattaatgtcgatgagcgatgtacggcgggcggcgattttgcgtcgctggctggcgatgcgtaatgcgccgatgccctctcgcgacgcgctggaacgtatctggcaggaggtggcgctggcgcgcgacgatgcctctccctgtttacgctttggcgatcacgagattcgccgttaccagtcgcaactgtggtggattaaatccgtggccggacaacacgaaacgacggtcgcctggcccgtctggcaaacaccgctggcgctgcctgccggcttagggacggtacagctcgttcctggtggcgaactgcgccgaccgcgagaggaagaatccgtcagcattcgttttaaagcgccaggcgtgttacatattgtcgggcgtaacggtggacgtaaattaaagaaaatctggcaggagcaggggatcccgccctggcgacgagataccacgccgctgttgttttacggcgaaacgctgattgcggctgcgggtgtttttgtgacgcgtgagggagcagcagaagataaagaaggggtgagtctggtttggcatgcctgatggcgctgcgcttatcaggcctacgtatcgcatggaacgtaggccggataaggtgcttgcaccaccatccggcaacaaaatactcaggattcgctaactaccacggtaccaatttccgggtggctgaaactggcgattttatcgagacgaagttcacaagactcgccggaaacttcggcaagcagatattctacgtttttacgtaagatcaaatcgttcgcttttgcctgcaaaacctcgccatcttttaacgttagcgtcagtattaaatgatgcatgcaggcaagctcaagactatcgtagtcatcgcaattaatgggttgatacgtttcattcattgacataatcgctcaccagtaagttcgcggcagcataagctgccttttccctgaccgactctgaaagggcgctatctgccgccacttcattaagcactttcaatacacaacccagcgcatccgggacataccctaagtctccgctggcgatttccgcataccgcttgcgtactaactcacaatatttttccacatgccctcctgtcagcattctgacttaaccgtggatgcaagtctaagcctacgaagttaaatcttgtttagcaaggtgactataccatactcatttgcgcaatatcagcgcctgacgcgagtgggtaaaagattcgttaacagccttttagcgcggttttcgctacaatgggcgcctgattcgaaaggagttttctcatggcgcttaaagcgacaatttataaagccgtcgtcaatgtggctgaccttgatcgcaaccggtttctggatgcggcattgacgctggcgcgtcacccttctgaaacgcaggagcgcatgatgctgcgcctgttggcatggataaaatatgctgatgaacggttgcagtttacacgtgggctcagcgcggaagatgagccggaggcctggctgcgcaacgatcatctgggcatcgatctctggatagagctggggctgccggatgagcgccgtattaagaaagcctgtactcaggcgagcgatgtcgcgctctttgcttataactcccgggcggcgcaaatctggtggcagcagcatcaaagcaagtgcgcgcagttcgctaacctgtccgtctggtatctggatgacgggcagctggcgcagctcagtgaatttgccgatcgtaccatgacgctacaggcgacgattcaggacggcgcaatctggctttctgatgctcggaataatctggaaatacagctaaccgcctggcaacagccctcatgattgccatctcccggacggtctccatagccgataatgagctggaaattacggccattcgtgcgcagggcgcgggtggtcagcacgtaaataagacctctagcgcgattcatttgcgctttgacattcgggcctctggcctgccagagtattataaacagcgtttgctgacggccagccaccatctgataagcgatgatggcgtcattatcattaaggcgcaggagttccggagccaggagctcaaccgggaagcggctatcgccaggctggttgccgtcataaaagaattaaccgcggagcagaaaagccgtcgcgcaacccgtccgacgcgtgcctcgaaagagcgccgtttgtcctcaaaggcgcaaaaatcttctgtaaaggcgcttcgcggcaaagttcgtcgtccactggattgacgggcaggaatagcaatttcataaggattttatggtgagaacagcaatattgtcagtagcggcagcctgtacgctatttgcattgatagggtgtaataaccgtgcggaagttgacgccctgcaacctgcgcaggcggcggaattaaaacccatgcagcaaagctggcgcggcgtgctgccctgtgcggattgtgaaggtattgaaacgtcactatttctggaaaaagacggcacatgggtgatgaacgagcgctatcagggcgtgcgcgaagaaccttcctcttttgcgtcatacggtacctgggcgcggacggcggataaactggtgttaaccgacagcaatggcgagaaatcgtattatcgcgcgaagggcaatgcgctggagatgctcgacagagaaggcaatccggtggcttcgcagcttaattatacgctggtgcctgttaccgccagcctgccggtaacgccaatgccgctgcgtggtatgtatgtatacagggccgatgcggcgacctttaccgattgcgcgaccggaaaacggctgccggtcgccagtaacgcccagcttgagcgcggctatctggcggcgaaaggtgaagcggaaaaaccggtgctgctgacggtagaagggcattttgtgtttgccgcgaacccggacacgggcgagccggtaaaaacgctaatagccgataaaaatgcgaagtttgcgccgggtaaagattgcactcactaataaaaggcctcgcagggtgcgaggcctttacatatctgccggatggcgccgggcaaccccaacaaaatgtcgtttagcccttaatcgccttgaccagataatcaacgatatcgccggttttaatcagcgatttttcaccgctacgacggtatttatactcaatatcgtcgttatccaggttgcgatcgccaatcacgatagtatgtggaataccaatcagctccatatcggcaaacatcacgcccgggcgctctttacggtcgtccatcagcacttcaatgccctgcgcgcgcaattcgctgtacagcttttccgccagctcctgcacacggaaggatttgtgcatattcatcggcagaatagcgacctggaaaggcgcaatggcgtcaggccatacaatgccgcgctcgtcaaagttctgctcgatagcagcggcaacgacacgtgttacgccgataccgtagcagcccattgtcaggatctggttacggccatcttcaccctgaacggaggctttcagcgcttctgagtacttggtacctaactggaagatgtgacccacttcgataccgcgtttgataagcaacgttccctgaccatccggactcggatcgccggcgactacgttacggatgtcggcaacaacaggcgtcgccacatcgcgatcccagttaataccaaagtagtgtttaccgtcgatgttggcgccagcggcaaaatcgctcatggcggcaacggtacgatcgatgatgaccggaatcggcatattgaccgggccgagggagccagggccggcattaattacggcgcgaatctcttcttcggtagcgaaggtcagcgggctggcaacgtgcggcagtttttccgctttaacttcattcagttcatgatcgccgcgaaccagcagagccaccagcggagacttgctgtctttcaccgctttcaccagcagcgtttttaccgttttttcaattggcaggttgaattgttccaccagctccgcgatggttttggcatttggcgtatcgaccagagtcatttcctgcgtcgccgctgcgcgcggcgtttgcggcgcgatagcttctgccagttcaatgttagccgcgtaatcagaaacatcagagaaaacgatatcgtcttcgccgctttgcgccagcacctggaattcatgcgaggcgttgccgccgatagaaccggtatcggcctgtaccgcgcggaaatccagccccatacggctgaagatacggctatacgcggcgtacatggcgtcataggtttcctgcaacgactcctgagaggtgtggaaagagtaagcatctttcatcaggaattcgcgcgaacgcatcacgccaaagcgcggacgcacttcatcacggaatttggtctggatttggaagaagttcagcggcaactgcttataagagctgagttcattacgcaccaggtcggtgataacttcttcgtgggtcgggccgagtacgaacggacgctcgccacggtcgacaaaacgcagcagttccggaccgtactgttcccaacgaccactctcttgccacaggtcggctggctgaacgactggcatcgacacctcgatagcaccggcgttgttcatctcttcacgcacgatgttttcgacttttttcaggacgcgcaggccggtcggcagccaggtatataacccggaggcgagcttgcggatcatcccggcgcgcagcatcagctggtggctgataacctcggcgtcggcaggtgtctccttcagagtggagagcaggtattggctagtacgcatgttgttacggttccagttgaacgatcgaacaggctcaatgtgagcctgatacaaaaaaagtgatttagtttaccagcgtgcaagagatgtcaaaagagaagggcgtgaaattaccgtggttccagcgcaaacacttcaaatcccgagttaaccacacgccagcgcacgttaaaatcatgcagccagacggcataggttttgcccgtctcttcacccttacgataagccgggcgaggatcttgcgccagcacatcgcaaataaatgtccgtagctgcggataacgcctttccagcgtcgtaagctgttgagccacctcagcggtaaaactcacgggcatttcagctatcggcgcctgttgcgcatagctggcggcggcgtccggtaaggcctcggcaaacggtaaatacggtttaatatccaccaccggcgtgccatccaccagatccagactgcctaatttcagaattacgctctctttccggcactcgataccttttagcgcaacgagcgacatgccaatcggattggggcggaacgtggagcgcgtggcaaaaacgcccattctggcgttaccgccaagacggggcggacgaactgtcggccgccagccgccgtccatcgtctgatgaaaaacgaaaagcacccacaaatggctgaacgcttccaggccgcgaacggcatcggcctggttgtaaggcgctatcagatgcagttcgccgcaggcgcttttgaccagaccaggctggcgcggaacggcgaatttttctttatagggggagcgaataacgccgatttgttcaaactgaaagctgctcatttcgccgaaatattcagggcggacccgatacaaaccgcctgacgatagcagcctggcgtgccgctggtaatttcacagctgtgcagcaggacggcgttggctttcattttagatgcattaatctgcatacgcttgcgcgcagttggaatgttaggcggagagtcttgatttgtcgcctggcaggattcgccgctaacctcgccaagatctcggaaaggtttgccgactaagtcttcagcattggtgtaaatcctgacgggagcggcacgcggcgctttaggtttctccggctccgcttttggcggggttgcggtgctttgaacgggttcaacaggggatctgcttagcatggaacaaccgcccagcatgagtgccaataaacagatcggtaaagcacgcataatatttcctcaatgaatgttctaattgccagatattgaatcaggagcttgcataaatgacaagacgggcaatagcccgtcctgaataatattacagattgtggaatcagcctaaaacttaccagcctttcaccgcgccgccattaaaaactttatttgcggcttcgtacacttcatcagactgataagcctgaacgaattttttcacattctcggcgtctttgttatcttcacgcgtcacgatcaggttaacgtacggagaatctttatcttcaacaaagataccgtctttcgctggcgtcaggccaatctggctggcgtatgtcgtattgatgaccgctagcgcgatctgcgcgtcatccagcgaacgcggcaactgcggcgcttccagctcaacaattttcagatttttcgggttttccacgatatccagcgaggtaggaagcagaccgacgccgtctttcagtttaatcagccctactttttgcagcagcagcagggaacgaccaaggttggtcgggtcgttaggcacagcgacctgggaaccgtccttgagctcatccagggatttgatttttttggaatatcctgcaatgggatagacaaaagtcttaccaacggaaaccagtttgtaaccgcgatctttgatttgctgatccagatacggtttgtgctggaaggcattggcatcgatatcgcctttgctcagcgcttcattaggcagaacataatcattaaaggtcaccaattccacgtccaggccgtatttttctttcgcgactttctgcgcgacttcggcaacttgctgctctgcgccaacgattacgccgactttaatatgatttggatctttttcatcctgaccgcaacccgcaagtgccagagaaccaatcagagcacccactgccgcaaaggttttgaatttgaacgccatgcttatttccttaatgagtatttgtgttgtgtttaacgttacttatgcgtgacagccctgacgatgcgatcgccggataactgaattaaataaaccagaacgacaagtaataccagcaccgtattcatcacggtagcattgtatccaatataaccgtactgatagccgatttgaccgagaccgcctgcgccgacggcgccgcccattgcggagtaaccgaccagggtgatcagtgtaatggttgccgcattcaccagaccaggcagcgcttccggtaaaaggattttacgtacaatttgcagcggcgtggcgcccatcgctcgtgaggcttcaatcagcccggcagggatctctaacaacgcattttccaccatacgggcgataaaaggcgcggcgccgacggtcagcggtacaattgcagcctgcaaaccaatggaggtgccgacaattattcgggtaaaaggaatcatccacaccagcaggatgataaagggagtcgagcggaaaatattgaccaccgcagagagggagcgatacagcctggcgttctccataatctgccccgggcgcgtaacatacagcaatacgccaaccggcaggccaatcacgaaaccgaagaaaccggagacaaaggtcatcgccagcgtttcccagacgccacgaaccagtaaccacatcattgcctcagacataacccagtacctctactttcacatggtgatcctgcagccaggcaattgcggcttgcgtctcttcttgcgtgccgtgcatttccgttagcataatgccgaacttcacaccgccggcgtaatccatctgcgcgctgataatattattgttcacgttgaaacgacgcgcggtttcagaaagcagcggggcatccacagactgcccggtgaattccatgcgcagcatcggcacgctgtcagtttccggcgacgctttcaaacgcgcctggtaatcttccggaatgtccagatgcagagtggactgaataaacttctgcgccagcggcgttttaggatgcgagaagacttcgctgaccgtatcctgctcaataagctcgccattactgataacggcaacgcagtcgcagatacgtttcacgacatccatttcatgagtgataagcagaatcgtcaaccccagacgacggttgatatctttcagcaattccaaaatcgaacgggtcgttgcgggatcaagcgcgctggtggcttcatcgcacagcaacacttttggattactggctaacgcgcgggcaatcgcgacacgctgtttctgaccgccggaaagatttgccggatagctgtcgtgcttgtcgccaagaccgactaaatccagcagctctgtgacacggcgtttgatctcttcctttggtgtgttatccagttccagcggcaacgcgacgttgccaaacacggtacgggaagagagcaggttaaaatgttggaaaatcatgccgatttgacggcgagctttggtcaactcagactctgaaagcgttgttagctcctgaccgccgacctgaacgctaccttcggttgggcgttcaagtaagttaacgcagcggataagcgtacttttaccggcgccggaggcgccaatgacgccataaatctgcccggcaggaacgtgcaggctgacattatttagcgcctgaatggtgcgcgtcccctgctggaacactttggtaatattcgaaagtttaatcattgattctttattatcgtaatgaaatgagcggaggcattttcgtctgcctaatacggtcaacgccgtcaacagaatggatgttaaggcatccagacgtctaaatcaatcaggctttatacgatgagcactttcttgcctgctgaaacatgcgatactagcgccacttgctttactcaggagctataaaaggtggcaaagtttgtacccgcaatttttctcgaccgtgacggcaccattaatgtggatcacggctacgtacatgaaatcgatgcatttgagtttatagacggcgttattgacgctatgcgcgagctaaaaaaaatgggctatgcgttggtggtggtgacgaaccagtccggaatcgcgcgcggcaaattcactgaggcgcagtttgaaacgttaaccgaatggatggactggtcgttggcggatcgcgatgttgatttggacggcatctattattgtcctcaccatccgcagggcagtatagaagagttccgtcaggtatgtgattgccgcaagccgcatccaggaatgcttatctcggcgcgtgatttcctgcatatcgatatggcggcttcttatatggtgggagacaagctggaagatatgcaggcggcagcggcggcaaatgtcgggacaaaagtgctggtgcgtacgggcaaaccggtcacggcagaagcagaaaacgcggcggactgggtgttaaacagccttgctgacctgccatcagcgataaaaaagcagcaaaaataagcgttatggataaaagatgagcggttaaaacaaaaatgcatttttccgcttgtcttcctgaaccgactccctataatgcgcctccatcgacacggcggatgtgaatcacttcacacaaacagccggtcggttgaagagaaaaatcctgaaattcagggttgactctgaaagaggaaagcgtaatatacgccacctcgcaacggtgagcgaaagccgcgttgcactgctctttaacaatttatcagacaatctgtgtgggcactcgaagatacggattcttaacgtcctcggacgaaaaatgaataccaagtctcaagagtgaacacgtaattcattacgaagtttaattcattgagcatcaaacttttaaattgaagagtttgatcatggctcagattgaacgctggcggcaggcctaacacatgcaagtcgaacggtaacaggaagcagcttgctgcttcgctgacgagtggcggacgggtgagtaatgtctgggaaactgcctgatggagggggataactactggaaacggtggctaataccgcataacgtcgcaagaccaaagagggggaccttcgggcctcttgccatcagatgtgcccagatgggattagctagttggtgaggtaacggctcaccaaggcgacgatccctagctggtctgagaggatgaccagccacactggaactgagacacggtccagactcctacgggaggcagcagtggggaatattgcacaatgggcgcaagcctgatgcagccatgccgcgtgtatgaagaaggccttcgggttgtaaagtactttcagcggggaggaaggtgttgtggttaataaccgcagcaattgacgttacccgcagaagaagcaccggctaactccgtgccagcagccgcggtaatacggagggtgcaagcgttaatcggaattactgggcgtaaagcgcacgcaggcggtctgtcaagtcggatgtgaaatccccgggctcaacctgggaactgcattcgaaactggcaggcttgagtcttgtagaggggggtagaattccaggtgtagcggtgaaatgcgtagagatctggaggaataccggtggcgaaggcggccccctggacaaagactgacgctcaggtgcgaaagcgtggggagcaaacaggattagataccctggtagtccacgccgtaaacgatgtctacttggaggttgtgcccttgaggcgtggcttccggagctaacgcgttaagtagaccgcctggggagtacggccgcaaggttaaaactcaaatgaattgacgggggcccgcacaagcggtggagcatgtggtttaattcgatgcaacgcgaagaaccttacctggtcttgacatccacagaactttccagagatggattggtgccttcgggaactgtgagacaggtgctgcatggctgtcgtcagctcgtgttgtgaaatgttgggttaagtcccgcaacgagcgcaacccttatcctttgttgccagcggttaggccgggaactcaaaggagactgccagtgataaactggaggaaggtggggatgacgtcaagtcatcatggcccttacgaccagggctacacacgtgctacaatggcgcatacaaagagaagcgacctcgcgagagcaagcggacctcataaagtgcgtcgtagtccggattggagtctgcaactcgactccatgaagtcggaatcgctagtaatcgtggatcagaatgccacggtgaatacgttcccgggccttgtacacaccgcccgtcacaccatgggagtgggttgcaaaagaagtaggtagcttaaccttcgggagggcgcttaccactttgtgattcatgactggggtgaagtcgtaacaaggtaaccgtaggggaacctgcggttggatcacctccttaccttaaagaagcgtactttgcagtgctcacacagattgtctgatgaaaaacgagcagtaaaacctctacaggcttgtagctcaggtggttagagcgcacccctgataagggtgaggtcggtggttcaagtccactcaggcctaccagattcgctcccgtgctttgttgtggcaaagctcgcatacttcagtatgcttcgcttcaccacgccgcgcccggaaacgaatcaaaggtaagaggttctgactacacgatggggctatagctcagctgggagagcgcctgctttgcacgcaggaggtctgcggttcgatcccgcatagctccaccatctcgtgagtgtttacgaaaaaatacttcagagtgtacctgaaagggttcactgcgaagttttgctctttaaaaatctggatcaagctgaaaattgaaacacagaacaacgaaagttgttcgtgagtctctcaaattttcgcaacacgatgatgaatcgtaagaaacatcttcgggttgtgaggttaagcgactaagcgtacacggtggatgccctggcagtcagaggcgatgaagggcgtgctaatctgcgataagcgccggtaaggtgatatgaaccgttataaccggcgatacccgaatggggaaacccagtgtgattcgtcacactatcattaactgaatccataggttaatgaggcgaaccgggggaactgaaacatctaagtaccccgaggaaaagaaatcaaccgagattcccccagtagcggcgagcgaacggggaggagcccagagcctgaatcagcatgtgtgttagtggaagcgtctggaaaggcgcgcgatacagggtgacagccccgtacacaaaagcgcatgtgctgtgagctcgatgagtagggcgggacacgtggtatcctgtctgaatatggggggaccatcctccaaggctaaatactcctgactgaccgatagtgaaccagtaccgtgagggaaaggcgaaaagaaccccggcgaggggagtgaaaaagaacctgaaaccgtgtacgtacaagcagtgggagccccaccactaagccagtggtgaactccacatccgcatcctttgctgaggatacggttaacggagcgaaagcgacgttcaaccgcaaaacaagcagagggggcttagtggtggggtgactgcgtaccttttgtataatgggtcagcgacttatattctgtagcaaggttaaccgaataggggagccggagggaaaccgagtcttaattgggcgttaagttgcagggtatagacccgaaacccggtgatctagccatgggcaggttgaaggttgggtaacactaactggaggaccgaaccgactaatgttgaaaaattagcggatgacctgtggctgggggtgaaaggccaatcaaaccgggagatagctggttctccccgaaagctatttaggtagcgcctcgtgaattcatctccgggggtagagcactgtttcggctagggggccatcccggcttaccaacccgatgcaaactgcgaataccggagaatgttatcacgggagacacacggcgggtgctaacgtccgtcgtgaagagggaaacaacccagaccgccagctaaggtcccaaagtcatggttaagtgggaaacgatgtgggaaggcccagacagccaggatgttggcttagaagcagccatcatttaaagaaagcgtaatagctcactggtcgagtcggcctgcgcggaagatgtaacggggctaaaccatgcaccgaagctgcggcagcgaacgtatcacccaagacaactttacggagttgacgattgacggagcgaagcgacgtcaaagcgttcattaaagtcgagttggcttagggatacgttcgttgggtaggggagcgttctgtaagcctgtgaaggtgtgtcgtgaggcatgctggaggtatcagaagtgcgaatgctgacataagtaacgataaagcgggtgaaaagcccgctcgccggaagaccaagggttcctgtccaacgttaatcggggcagggtgagtcgacccctaaggcgaggccgaaaggcgtagtcgatgggaaacgggttaatattcccgtacttggtgttactgcgaaggggggacggagaaggctatgttggccgggcgacggttgtcccggtttaagcgtgtaggtgtgtgttccaggtaaatccggttcactttaacactgaggcgtgacgacgaggcactacggtgctgaagcaacaaatgccctgcttccaggaaaagcctctaagcatcaggtaacatcaaatcgtaccccaaaccgacacaggtggtcaggtagagaataccaaggcgcttgagagaactcgggtgaaggaactaggcaaaatggtgccgtaacttcgggagaaggcacgctgacacgtaggtgaagtgatttactcatggagctgaagtcagtcgaagataccagctggctgcaactgtttattaaaaacacagcactgtgcaaacacgaaagtggacgtatacggtgtgacgcctgcccggtgccggaaggttaattgatggggtcagcgcaagcgaagctcctgatcgaagccccggtaaacggcggccgtaactataacggtcctaaggtagcgaaattccttgtcgggtaagttccgacctgcacgaatggcgtaatgatggccaggctgtctccacccgagactcagtgaaattgaactcgctgtgaagatgcagtgtacccgcggcaagacggaaagaccccgtgaacctttactatagcttgacactgaacattgagccttgatgtgtaggataggtgggaggctttgaagtgtggacgccagtctgcatggagccgaccttgaaataccaccctttaatgtttgatgttctaacgtggacccgttacccgggttgcggacagtgtctggtgggtagtttgactggggcggtctcctcctaaagagtaacggaggagcacgaaggttggctaatcctggtcggacatcaggaggttagtgcaatggcataagccagcttgactgcgagcgtgacggcgcgagcaggtgcgaaagcaggtcatagtgatccggtggttctgaatggaagggccatcgctcaacggataaaaggtactccggggataacaggctgataccgcccaagagttcatatcgacggcggtgtttggcacctcgatgtcggctcatcacatcctggggctgaagtaggtcccaagggtatggctgttcgccatttaaagtggtacgcgagctgggtttagaacgtcgtgagacagttcggtccctatctgccgtgggcgctggagaactgaggggggctgctcctagtacgagaggaccggagtggacgcatcactggtgttcgggttgtcatgccaatggcactgcccggtagctaaatgcggaagagataagtgctgaaagcatctaagcacgaaacttgccccgagatgagttctccctgagacttagagtctcctgaaggaacgttgaagacgacgacgttgataggccgggtgtgtaagcgcagcgatgcgttgagctaaccggtactaatgaaccgtgaggcttaaccttacaacgccgaagatgttttggcggattgagaagacaacaattttcagctcagattcagagtccgaaggattttacgctgagacaaggcggcaaacgcagcgacggaaggagcatacagaagtatgtgactgacgctcgcaagagcagccaacgccgtatcagtgtaaaagacacaggacggagcacaaagaatttgcctggcggcactagcgcggtggtcccacctgaccccatgccgaactcagaagtgaaacgccgtagcgccgatggtagtgtggggtctccccatgcgagagtagggaactgccaggcatcaaattagaagtatggcattaactttcggggcagttcactactcgacagagagtaggacaaaagcgaaagcttttgaacgttgcgaagcaacggcccgaagggtgaatcacgaagtgattcataaactgccaggcatcaaattaagcagtaaactgatgtaaaaatcagtggttgtaaaagaattcggtggagcggtagttcagttggttagaatacctgcctgtcacgcagggggtcgcgggttcgagtcccgtccgttccgccacttattaagagccctgagcattagctcagggctttttctttccatgtcatttaattattgctcaattcgcaaaaatcctctgcatttctcgctctttttctgcaaagcgctgaaggtcataatcccctcagttaacgaacatagtgattaaaaagaggaattctatgactatccctgcattcggtttaggtacttttcgcctgaaagacgacgtggttatcgcttctgttaaaacggcgcttgaactgggctaccgtgctgtcgacactgcgcaaatctatgataatgaagcggctgttggacaggcgattgctgagagcggcgtaccgcgtaatgagctgtacatcaccaccaagatctggattgaaaaccttagcaaagacaagctaatcccaagcctgaaagagagtctgaaaaaactgcgtaccgattatgtcgatctgacgctgatccactggccatctccgggtgatgccgtgtctgtcgaagaatttatgcaggcattgcttgaagctaaaaaacaagggctgactcgcgaaattggcatttcaaacttcaccattccgttgatggaaaaggctattgccgcggtgggcgcagacaatatcgccaccaaccagattgagctatctccgtatctgcagaatcgtaaggtggttgactgggcgaaagcgcacggtatccacatcacctcttatatgacgctggcatacggtaaggcgctgaaagatgaagtgattgcgcgcattgcggctaaacataatgcgaccccggcgcaggttattctggcatgggcaatgggtgaaggttactccgtgatcccttcatccaccaggcgtgaaaatctggcaagcaacctgctggcgcaggatctgcatctggatgccgaagataaaaatgcgatcgcggcactggactgcaacgatcgtctggttagcccggaaggactggctcctgcctgggattaattacccgatcctttgtacctttacccctctttcacagctcctgcgggagctgttcttatatattcgctcaaaaagtcgataaatgcccgaatacgtgtgctgacggcgcgatcgctgtagtaaacggcgctgaaaggcatttctaccggcagacgtttatcggccagcagttccaccagttctccccgcgcgatctctttatcaatcatataatctgaaagacatgcaatgccgttaccgttcaggcaaagttgttttaacgtttccccgctattggaagaaatcccacatttgatctcatggagctgcccgtcgctacaggcaatcggccaggtattgagcgaaacaggttctgagaaccccagacacagatgccgtttcaactcttcaacggtctcaggcttgccaaagcgggcaatataatccggcgaggcgataatcttgcgatagctggtaaataacgggcgcgcgcgcagacttgaatctgtcaacgtgcctgcgcgtatcgcaacatccacttttcgttcaataagattgatgaacgtttctgaggagacaagagacaacgttatttccggataccgttcacgaaaaggtttaatcagcggcatcaggaaatgcagcattaccggcgttgccgcatcgatacgcagtaagccgcgcggggtattacgcgactccatgatttccgtttctgcggcggccatttcttgcagtatctgctgcacgcgcctgaagtatcgctctccttcttcagtcaggctcagctgtcgggtcgtacgattaagcagactgacgccgagcttcatctccagctttttaactgcccggctgacagcggaattggcctgtccaagctgctctgccgcccggctgaagctgccgctttccacgacagcgacaaaaattgcgagttcttcggaggtggctttcatttttgctcctgaagcaaaattaaattgatattttggctatttttgtcattaaaacatccaggcatactgcgtgtcatctgattactgctgttatggagttatgtatgcctctcgctttatttgcactgacaataagtgctttcgctatcggtacgactgagtttgtgattgtcggcctggtgccgaccattgctcaacaactggctatctcgttaccttccgccggaatgctggtttcaatctatgcgctgggtgtggctattggcgcgccggtgctaaccgcgctgaccggacgcctgccgcgtaaacagttactggtcgcgctgatggtcttgtttacggcggggaatttgctggcatggcaggcaccgggctatatgacattaatcgtcgcccgtctgctgacgggcctggcgcacggcgtgttcttctcgattggatctaccatcgcgacaagtctggtgccaaaagagaaagcggcttctgcgatcgctattatgtttggtggtttaacggtagcgctggtcacgggcgtgccgctgggaacatttatcggtcagcattttggctggcgtgagaccttccttgcggtatcactgttaggcgtgattgcgctgatgagcagtcaattgctgattccggccaatattcccggtcgggcggccgccagcattcgtgaccaggtgaaagtactgactcatcctcgtctgttgctgatttacgccgttacggcgctgggctacggcggggtattcacggcattcaccttcctggcgccaatgatgcaggatctggcgggattctccccggcagcggtaagctggatcttactggggtatggcgtatcagtggctatcggcaatatctggggcggtaaactggctgataagcatggtgccgtgccggcgctgaaattcattttcgccgcgctgtttgttctgcttatggtcttccaggtgacggcctccacgcagtatgctgcgctggctaccatcctagtgatgggggtctttgccttcggtaacgtaccggggttgcaggtctacgtggtacagaaagcggaacaattcacgcctaatgcggtagatgtggcgtcaggtctgaacattgcggcgtttaacattggtattgcgctgggctccgtgattggcgggcaaacggtggagcattacggtttggcgcagacgccgtggattggcgccctcattgttctggtggctttcctgctgatgggtgtcagcggacgtcttgataaacctgtacgcattgctctggagtaaattattgatgtaagcgcctacttacaaaacaaactgcaattgttcgttgaaagtgagtgctaaaatccctataacagaagaaccagtccggttgaggactggttgacgttacagaggtttgaaagtcaaaagtgcgaaaaaacacctatgcgatgcgctatgttgccggacagcccgccgagcggattttgccgccagggtcgtttgcgagcattggccaggcattgcccgccggggaaccgctaagcaatgaagagcggatccgtatcctcgtgtggaatatattcaagcagcagcgagccgaatggttatcggtgctgaagaactacggcaaagatgcgcatctggtcctgttgcaggaggcacagacgacgcctgaactggtacagtttgccaccgctaactatcttgccgccgaccaggttcccgcttttgtactacctcagcatccgtctggcgtcatgacgctttctgccgcccatcctgtttactgctgccctttacgggaaagagaaccgattttacgtttggcgaaatcagccctggtgacggtatatcccttgccggatacccgtttattaatggtagtaaatgttcatgcggtaaattttagtctgggcgtggacgtatacagtaagcagttacttccgatcggcgaccagattgcgcaccatagcggccctgtcattatggcgggtgattttaatgcctggagccgcccacgtatgaatgcgttgtaccgctttgcacgtgagatgtcgctgcgccaggtgcgtttcactgacgatcagcgccgtcgtgcgtttggacgaccgctggattttgttttttatcgtgggttaaacgtgaatgaagcctccgtactggtgacgcgcgcttccgatcacaatccgctactcgttgaattcagtcccggcaaacctgagcaataaaggtgagtcaggtctgccgtggggcaggcctctgcgggtgctgccctctatttttctcataacagaagggcactaccatgacaacgcattcccaccatgacaatgttgaaaagcagtttggttcacaggcgaacgcctatttacatagcgccgttcacgcagcgggtcgtgacttagcgcggctggcgcaaaggttgtctgatttttcccacgcgagcgtactggatatgggatgtggggctggacacgcgagttttgtcgctgcgcaacatgccaactcggtcgtggcatacgatttatccgccagcatgcttgaggttgtcgctggagcggcggaagaaagacatttaagtaatattactctccggcaaggctatgccgaaaaactgccctttgaagatgcatcgtttgaggtggtgattagccgctattccgcgcatcactggcacgacgttggtcaggcattgcgtgaggttaatcgtgtattaaagcccggtggcgtgctgattatcatggatgtcatgtcgcctggacatcctgtacgcgatatctggctgcaaacggtggaggcgttacgcgacacgtcgcatgtccgtaactattccagtggcgaatggctggcgatggtcaataacgcgatgctggtaacgaataccgtgataacagatcgtttatcgctggagtttcgctcatgggtaacgcggatgcgtacgccagcgccgttggttgaggcgattcgattatatcaggcgagcgccccggtagaggtgaagcgttattttgagttgcaggatgacggttcgtttagcagcgatactatcatgctggaagcgcataaagcggtatagcaatttaaaaggcgccgggggaagcggcgccttttggctttttcgtcggacaatatcaggagtctggcgtgctattgtccttcacaaacaacgtaagctgatcgcccggttgtagattatccgtatcatggttccagcgcatcacatctttgatattcaccccgtgacgtctggcgatactggaaagcgaatcgcctttacggacacgataggtaatgctatcgctattgtttgccagtcgttgcgcgctgctgccagcgcccacggtcaggctttgcccgattttcaggcgtgaaccacgcaggttgttccactgctgcaagtccttcgtgcttacgccaagccgcgaagcaataccggaaagcgtatcgccagagcgcaccttatagctacggctattcaacggcgtattgtcggcgatcagttgggactgaacggcgtcaatctcaccggaagccagcgactcacgcaactgctcggcatgctttttgggcaccataacatattgcggaccgcttacgcctaaggtagacccttttacaccggcattaaacgtcttcagcttgctgatagacatgcccgccatatccgcaacctgcgccatttcaactggactgtttaaacgaactcgtgccagcgctcggctttcatctgttgttggcagacgtacgccgtagcgtttgctgtttttgagaatttcactcaatgccagcatcttaggtacgtagagttttgtttctctgggcaaagaaagcgaccagaaatccgtcggttttccacgcgctttgtttgctttaattgcccgcataacacggccttcgccgctgttatacgctgcaacggttaacagccagtcgccgtcaaacattttgttcagacgctgcatcatgtctaacgcggcggtcgtagaggctacaacatcgcgacgcgcgtcataattacgggtctgctttaaaccataattgcgccctgtgctcggtatgatctgccagatgcctgcggcattggcgccagacgttgcgtgaggatcaaaagcgctctccactatgggtagtagtaccagctccataggcatgttacgtttcttaacctgccccgctatccagtacatatacggctctgcccgtaaagttacatcgtggagatagctcttattgcgtaaatacttctgtttctgttcgcgaatccggctgttttccggaattcccatctttagctcgtcgccaatgaaagcccacaagtcctgatctggcgcgatagacgttccgtcgtccatccatcgtgcctgactcgtaaactttcctgcttccccttgaccagctgcagaaaggctctgtgcgtgctgttggacgttgccagtgttctgagacgtctggcaccccacaagcaggacagaggcgagtaatatcgcttttgccttcatgtgtgtgtcaatagttgcttaaaagacgaccgatcataacggcgaagttagcgaatgacaagtaagaattatcagaacgtgtctttctttgaccttaaccatgcaaaacgcgcttctggttgttgcaatattgtttctttgtttatttcgttaattaaatcaatatcttcagttcttaaaaaaagattaatcttacgctcatttttaagaataacgggtaatgtcatttgtttttttacacgtaactctttaactttacgataatattcatttatgaacgaatcgtgcggaagtatgctcaatgcgaacttaatgttagctaaagtgtattcgtgagcgcagcaaatgagcgtgtcgtcaggcagagagttaattttcataagtgactgatacatctgtgatggcgtgccttcaaacagtcgaccacagccgccggaaaacagcgtgtcgccgcagaataagtaagggcggctaaagtaacagacgtgtcctaacgtgtggcccggcgtggcaaaaagagtaaatttctcgcctaaaacgcgaatagtatcgccatcgccaacaagatgggttgctcccttgtcttgcgtttccgccggtccataaaccgtcatttgcgggaagtgttgcaacagctctttgactccgccaacatggtcgtgatggtgatgcgtcaaaaaaatcgcctccggcatccacttatgttcagcaatggcctttaagacgggggccgcttcgccgggatcaacaatcacacagcggccttcatcattggtcagcacccagatgtaattgtcctgaaacgcgggaatactgttaagattcatatattacctctcaaataattagcggaaggttgcgatgaaaccggcaaggctctctcaaactgtcgttgcgcccggatgttggggtgagttgccctggggcaattactaccgtgaggcgctggaacagcagctaaatccgtggtttgcaaaaatgtatggtttccatttgcttaaaatcggtaatttaagcgcagaaatcaattccgaagcgtgcgcggtctcccatcaggtgaatgtttcatcgcaggggtcgccgatgcaggttctggccgatccgctacatcttccttttgcagataaatccgtcgatgtttgtctgctggcgcatactttgccgtggtgtaccgacccgcaccgtttattgcgggaagccgaccgcgtattgattgatgacggttggctggtcattagtggatttaacccgctgagtttgatggggttacgtaaactggtacccgttttacgtaaaacaccgccctataatagtcggatgtttacccttatgcggcaactggactggctgtctttactcaatttcgaagtgctacattatagccgttttcatgtcttaccctggaaaaagcagggggggcggcttttaaatacgcatatcccggcgctgggctgtttacagcttattgtggcccgtaagcggaccatcccgcttacgcttaatccgctgcgacataataaaagtaaaacccctatccgccagaccgttggcgccacccggcaatatcgcaaaccggatggctaagcttccgcctggtagccactatcttcctgcgtgggattcattgccgcggcgcgcgccagttcatcacaacgctcgttttcgggatggcctgcatggcctttgacccatacccatttgatctgatgctgacctaacgcagcatcgagacgtttccagagatcgacattttttacgggtttcttttccgctgttttccagccgcgtttcttccagttatgaatccattgggtaattccttgccgcacatattggctgtcggtgctcaatgttacttcgcaatgttcttttaacgcttcaagcgcgacgatcgccgccatcagttccatacggttattggtggtcagcgtgtaaccttcactaaacgttttttcatgaccgcgatagcgtaagatagcgccataaccaccaggccctggattccccaggcaagagccatcggtgaaaatttctacctgtttaagcatctctggtagacttcctgtaattgaaatcgataacaaaacgcaagtctgacataaatgaccgatatgagcactgcaattacacgacagattgtcctcgataccgaaaccaccggtatgaatcagataggcgcgcactatgaaggtcacaagattattgagatcggtgcggttgaggtgataaaccgtcgtctgaccggcaacaattttcatgtttacctgaagcccgatcgccttgtcgatccagaggcttttggcgtacacggtattgccgatgagtttctgctggataagccggtttttgctgatgtggtcgatgagtttcttgattatatccgcggcgcggagctggtcatccataacgcatcgttcgatatcggctttatggattatgagtttggtctgcttaaacgcgatattcctaaaaccaatactttctgcaaagttaccgacagcctggcgttggcgcggaaaatgttccccggcaagcgtaacagccttgatgcactgtgttcgcgttatgagatagataatagcaaacgtactttgcacggcgcattgctcgatgcccagatccttgctgaagtgtatctggcgatgacgggcggacaaacgtccatgacgtttgcgatggaaggagagacgcaacggcagcaaggtgaggcgaccattcagcgaatcgttcgccaggccagccggttacgggtcgtttttgcctctgaggaagagctggctgcgcatgaatcgaggcttgatctggtgcagaaaaagggcggaagttgcctttggcgggcgtaatttattcctttttaggctataaaaatcatccttcgggcgatttttgcagcaactgattcaaaaggtgagaaaaagcgttgacgggcgacaccgcaaaccgtaatattcgcctcgttcccagcgggaacatcacggagcggtagttcagttggttagaatacctgcctgtcacgcagggggtcgcgggttcgagtcccgtccgttccgccagatacaaatctcagggtgtttttatacatcctgtgaagtaaaaaaaaccgtatcactgtaaaagggatacggttttttttcgtcttcaagaagttccaccgtctatcgtggaatctggcgcaaatgggcctacgcctggatgacgaacaggatattaccgccacttctttcactgtcatggctattttgatcccactgacatttaaggcgcggcctcatggcggtgcttaaccgggatcgggacatgttcagcgcagaagcagactgcgtaatgttgatatcactcagataattacggagaaccgccagacatgcgcatcatcactccagggcatcccacttctccagcaactccaccgggatctcattgatcacctccgagaaccgttttcccaccagtctttcagcctggcgtaacagtgggatggtcgggctactgggttcactgctctcaaaccagcgacgaatgcaccgcaggcgttccagcgcatcattacgatcgcgaattggccccggttcagcattgtgtgggagggatataccgggtggcgcgttgacaggcggcacatcctctgcccgtgccggaacggcattatccataaccgtgcctgcggggtctggcactggcgctggcgacggagggatttccggtgtggttgtctgtaccacgtcaggcagcagcgctaacaactgccgcaggcgtgaaaaatctggagccagatcgcctaatgtctcacgcgcccacacttgcaggcgttctgcgctttcctgcgcttcgcgaaacgccgccagcggtaatgccccacgggcttcgaggtcggccagttgctggcggacggattcgggggccagcgcatcagccgggcggggagcggataacgcgcgctccacatcccgtacctgtaggcgcagggcggcactgtttgacagcgtaataccgcgaatgtccgccatcacgccttcgtgatccagcagcgccgccagggcattactgcgcgccagcgacgcatcttcaatagattctgcggatgcgccttcgccggtaagcagctgtggatggagtgcatcagaccagattacgctcagttctgccagttgtgtgagcatttccgccagtccctgtgcgccagcctgctggatgcgactgcgcagcagcaggatcaacacccggatatccttactgcgcgtgagcagacggcgcgcatcacgttcaatttccggccagttcacggcttccggcgtactgacaaaatcaccatattgcgcctccgcctggggggcggcgcggctgaacagcagcaggtattccggatcgtactccggatcggggccgcagggttgttccgcgcttaccggtttagtcagggacatgtccatatcattactctcagtgggttaagccgtgttcaggttcaaaaatcatgccggtcaccggacggtcatgcatggctttacctgcccaggccgtccagccaagccgctgcgcgccgccgatcaccgcaggcggtgcggcatgaggcttcaactgcagctcaatttcccagcaatattcaaaaccgatgaacgtacgcaccagttctgtcagcacgggcagattgttgccgccgggcagaaaacgcaggtaatcctccagcgtgagcgggccgataattagccggaatttgtactgcatatccggtacggcctggccgataagcgccccgttgcccagcaccgaagactgcgcgggcgtgcccagacgggtgatttcatcgttcgccaccgttatccagtgcagggcgaattctttcaccgcaaaaggtacgctgaaatagtgcgccagcgtggcggccagcccgtcaggattgcgcgattcgcgtaccagatgggcggaggctgccaggcgaacatgatctgacagcgggctttcggcgctttcccgtagatcctgcccgctgagactggcgatataaaacgcaaaacggtcgtgttccggtttgtccagcccgccaccagcggactgggcgctgcgccatgcctgccagaactgcgtcagccagcggtggtgaaaaatattggaaaaatgaaccagcgtcggatcgtgacgactctctgagcggttcagtgccagctcggtatagtgcagcggcaacgggccgtttggcccccatagtccgaggctgtacaggctcaggtgcaggcgtccatcctgccagctgacctgggcgatttcccgtggcgcaaaggtcatcgtcggcgtctgtcccagacggaatttttccatccgtggctgccagatactgcctgccggagtatcacagagctgggcatccacgcgccgcatcaggttcaggaatccgtaacgccagggggttttctgcgcctggttgagagcgccggtcatacgctcccccgttgcccggttctgaccggccaggtcatgacatgcccgcgttgcatcgagtgcagcgtcatctgcgagaaggtattaatggaaacatggcgggcaatatagtgttccagcaccagaccgaacaggtaaggactgataccggaaaatccttcttcgtccacggtcagttcgcaactgacgccccggccatagaccaacaggccggagccgggcaggcggcgggtcaccggggtggttttgcagccaatcaggctgcgcacctggcgcgactgcgggctgtcgtgagccgggataaacagattcagcagatcgcgcagcgcctggccgccggtgcggtgatccagatcggccagcggcagataattaaacgacaactgccggatcagccgccaggccatttcgcgttcagccagcggcggctgcggcgggcgcggcggtctgataagacccacgcccgccaccggaatcgccgcatctacggtcagatcatcccggccattacgtggaataaggcagggcagatcgcggttagtcaccattgccgtgacggtgatatggcgcagattttccgggtagggcgcttcatgctgatcaaccagcgagaggaagacttccgagccggtatagggggttcgggtgccatagcggcgggcgttttctgacgagcggcgcggttcacgacgcagtgaaaaataacgcccgtggttgccttcgtcattattacgggtgtgatacagcggacgaaaaatcatcttccgtgtggtttccgcttccaggccttcgacttcctgaacagaaaacacctcgtaatccagcggacgggtacgatccaccaccagatgctgttccgtcacgctgtgagtgacttcaatccgggtggtggtgcgaggaagcaggttgatcaccggcgtacagaacaggctgaactgtgcagcgtccgtctgatgaatcagccagtccggcggcaggcggttaagcagtatgacaatttccgccacattgccctgcaccttttgtaacccggcagacaatccggtcggggtgaagaagtaaaaccgttccggacaggcgaaaaattcatgcagcagattatggccgtgaaacacgttccaggcgagcggtagcagcccctgccctggctccagcccttcgtgcgccaccgggtgttgaagattcacattcagttcgccgtcaaagtgaccgggttcaccggccagtgtggcgacggcgctggtatgtagcagctcaaacaggtgtgacgcaatgcgttcttcgccgcagaggtaaaagggcagccgtgccggaccggccagctcgctgaaagtcagttccccgaaggttcgcagggtgatgcgcaatgccccggcgacatgaatattaggcggcagatagcggtgcagggcgggcatatccggcggcgcggcggtcaggcgtacctcctcgatggacagcggccacagcgtgacgtcctggctgctgcgaaactggcaggcggtattttcgccttccgggatgggggaaacgaacgcggtatcgcgcggcacggtgacccctttcgccaggtcgccttcctgcgtatcgggatacagctttaccactgccatcgatggcgtgggggtgacgtaattggggctgacgacttccagtaaccgctgtgtgaagcggggaaactcggcgtcaatttttagctgagtgcgggcgctcagaaagctgaacgcctcgatcatgcgttccacatacgggtcggcaatatcggttccctgcatccccagtcgggcggcaattttgggatggagggtggcgaactcagcaccggtctcccgcaggtagctcagttcgcggttgtaatactccagtagccgtggatccatgaataatgccctgtattaaaagaacgtaatgcggctcagctccatatccagcgcgctgcgtaccagaaactccgtgggatacggctgcgtcagaatttgtccgcgaatttcaaactgtagcgtgttatagctaccctgccgggttttatcgagcaagggcgtgaccctgagtgtggcggcgttcagccggggttcgaaacggataatggcgcgccggatcgcctcgctgatatcgtcccacttatgctcatacataaagctgcccgccagcggcggcaggccatagttgagcactgacgccgccgcctgcggatagcgccgggcgtcgatgtcaccctcgtggctaatggtattgagcaaaaaggagagatcccggcgaatgatctccttcagttgtaccggcgtgacgctgatatcccggtcaattttctgatacggagcattgtcacacagccgatcaaacagcgtgggcagcaggtggttagcgggtgtaaaacgagacgtgctcatgcgccatcgttttcctgagcatgaaaggtacaatgggccatgtccagcaggctgatatcgccgtggctggtcagccacactttctgccccagcgcccgcacggtggtttcgccggggccgtcctgccaggcggtttccctgcacagacgcagggcgtcggatgcactttccgaaccgctgtaacgggtaaagagccaggcgccgtgcgtatcgccattcaccagggtgatattaacgggtttccacagcagatcagtcaggcgcgtcggttgcggcgattccagcgagcgtatttgcgaaaacggcagccagatatacacgccgccggtgactagctcaagtaccgggccaaggcgggaatcgctgtcgctcgcccagtcaaatgcgccgccgttccactgcccgcccgtgtctgttatggcttccagtgcggtattacggtgtttatcaacctcaccggtatcgtcatgacaggcgagtgccgccagcagtgactccacccaaacgggctgcggcagaagaaaaccgggtcgttgttcaccctgaaaaacggtgtggcggaacatttcgcagcgaaccagctcccggtacagccgggcctcctgggtataattggcctccatcctggcgcatagctgaagctggtgtagcgcccgcgaccagtctccggccacacacagcaactgaaacaggctgtggcggcagagcgctttcgccggattttcccgaacctgctgctccgccatctgaatcccctccgcaatagagtattcctgtatcagcgcggacagggtagcaggaagcgtgtcagtttttttcatgggcggtatttccatttttctgtgtcggagtgattcggtagtggctatcgatgccaataatacgatgctcgcggcgggtcagatcgggcagtatctcgctatgtgcggttttcccccccagttccggcgagagcagttgcaggatatcgggcattgattccatcgccagccagtgcatttcaccctcaccggtcgtgtccagcgtatccagaatggcatcaataccgggcgcgcctgccaccatatcctgtaacgtgtcggtgtcgccctttttatcgtataacgacgtcaaatcctgggtgacagcgtcttcatttcggggaaacggtttagcacggaggggcttttcctgcccggagggccgcaatgcctgctgatattcctggtaaagctggtgtagtgtgctatccgcttcatggccagtgtaagaggatgcggtttcccggacgggaataatatcgaacgggttctgcggattgagctgttgttgtttaaaccagtccagatccaggtactcagcaacggattcagatgactgaaccaactgaggaaacgaaacatcgggacgggactcatcattggtgcgggcaaggcaccaggatgacagaccccattcaatcgtatctccatcattcagccgcatacggtgatgaggttccatcacctgctcattgacggcacagcacagttcatcagagtgattaacaatccaccacgcctcttcgtggcgaacaagactgagcgcgatatcgtctttcccatgttgctcaaaaagcggaatgtagggggcggcggcagtaaatacgatgtatgtccctgcgggatactgtgcgttatccgttataccctgcgactgtattttccgtaattcccacatgtcttgtttcattatgtcccttaaatgtatttatttttctggaggaaacgtttagggagttttaattcataaataattttaactaaatttatagggagtcattattgatgacaccctttttattattttcgtcgtgaatgcattgttgtatgcatagatgtcttttttgaaatattatttcttttaattctgcaattgcgatttttatcttgctgttcattgattatttaatattaacggcttagttgctaattagtccctgatctgtatcattgttttgtttcgatattttttcgaggctatcaataaagaattgtttatatatttatatgcattgatgcattatttttatgaatttttatgtcacaaggcataacacatggaaactcctgtttcacgcagtgcgttgtatggaaaactggccggcccactattccggtcgctggaatcggcaacggcattttgcaaactacgctctaatccctgggttgagctgactcactggctgcaccagttaacacagcagcccgataacgatattctccacgttcttcggcattaccagatccctctttctgatgtggagaaagcgttactccggcaactggatatgctgcccgccggggccagcgccattagtgatttttctcaccatatcgatctcagcgttgaaaaggcctggatgctggcgagcgtccgttacggcgataacaaaattcgcagcggctggttgctgctggccttgttgaccacgccagaactgcgtcgggtactgagcagtatctgcgcgccgctggccacgcttccggttgatgaactgacggaaatactgccctcgttgatcgaaacatcgccggaagcgcaggagcgcccttacgacggctccggcctggcatcagccattcccggtgaaagcagtcaggcgattcccaacggcgggcaggacggtaaatccgcgctggcaaaatactgtcaggacatgacggcacaggcgcgcgacggcaaaatcgacccggtgacggggcgtgagcatgaaatccgcaccatgacggatattctgctgcgccgtcgccagaataatccactactgactggtgaggcgggcgtcgggaaaacggcggtcgtcgaaggttttgccctcgcgattgcgcagggggaagtgccgcccgcgctgcgggaagtacggctactggcgctggacgttggcgctctgttggccggagccagcatgaaaggcgagtttgaatcgcgtctgaaagggttactggaagaggccgggcgctcgccgcagccggttattctgtttgtcgatgaagttcacactctggtgggcgcgggcggcgcatccggcacgggcgatgccgctaacctgctgaaaccggcgctggcgcgcggcaccctgcggactatcggcgccaccacctggagcgaatacaagcgccatattgagaaagatccggcgctgacccgtcgttttcaggtgttgcagattgccgaaccggaagagatccccgcaatggaaatggtgcgtggtctggtggatacgctggaaaaacaccataacgtactgattctggatgaggcggtacgtgcggcggtacagctttctcaccgctacattcccgcccggcagttgccggataaggccatcagcctgctggataccgccgcggcccgcgtggcgctgacgctgcacacgccgcctgccagcgtacagttcctgcgccagcagctaaaagcggcggaaatggaacggtcgctgttgcagaagcaggaaaaaatggggattcagtcagatgagcggcgcgatgcgctgatggcgcgaattttctcgctcaacaatgaactgactgcatccgaatcccgctggcagcgggagctggaactggtacatacgttgcaggaactgcgtctcgcagagtctgatgctgatgacaaaaccacgctgcaacaggccgaaacggcgctaagggagtggcagggcgacgcgccggtggtgttcccggaagtcagcgcggcggttgtcgcggcgattgtcgccgactggaccggtattcctgctgggcgcatggtgaaagatgaggccagccaggtgctggaactgcctgcccgactggcgcaacgcgttaccgggcaagacggcgcgctggcgcagattggtgaacgtattcagaccgccagggcgggactgggcgatccacgcaaaccggtgggcgtgtttatgctggccgggccgtccggtgtcggtaaaaccgaaaccgcgctggcgctggcggaggctatctacggcggcgagcagaacctggtaaccatcaatatgagcgagttccaggaggctcacaccgtttccacgctgaaaggcgcgccgcccggctatgtgggctatggcgagggtggtgtgctgacggaagcggtgcgtcgccacccctggagcgtagtgctgctcgacgagatcgaaaaagcgcaccatgacgtccacgaactcttctatcaggtgtttgacaagggtgggatggaggacggcgagggtacacatgtcgatttcaaaaacaccacgctattactcaccaccaacgtgggttccgacctcatcagccagatgtgtgaagatccggccttaatgcccgatgctacggggcttaaagaggcgctaatgccggaattgcgcaagcatttcccggcggcatttctgggccgcgtgacggtgatcccttacctgccgctggacgaaacgtcgcgtggcgtgattgcccgtctgcaccttgaccggctggtggcgcggatgagtgaacagcacggcgtgacgctgacgtatagcgaggaactggtcgcacatattgtggcgtgctgtccaatgcatgaaacgggcgcgcggttgctgattggctacatcgaacagcacattctgccacgactgtcgcgctactggttgcaggccatgacggaaaaagccgcgatcaggcagattgatatcggcgttaatggtgatgagcagattgtttttgagatcgtttgctgaaaccggccgttcgaagtgtccgtagtgcgattttaaaaactgtaccggtataccgctccccttgcggcaaccagttgactaaaaaggaaatgaaggattatggctatcaacaatagcgcgcagaaattcatcgcgcgcaaccgcgcgccgcgcgtgcagattgaatatgacgtagagatttacggttccgagaaaaaaatcgagctgccgttcgtgatggcggtgctggccgatctggccgggaaaccgcgtgaagaactgccgccggtgacggatcgcaaattcctcgatattgatattgataacttcaatgagcgcatgaaagccattgcgccgcgcgtggcgttcgctgtgccgaatacgctgacgggtgaaggtcagttgatggtcgatatcacgctggaaaatatggacgacttttcgccggcacagattgcccgcaaggtggacgccctgaaccagttactggaagcccgcactcaactggcgaacctccagacctacatggatggcaaggcgggggcggaaaatctggtcaataaactgttgcaggacccgactctgctgaaaacgctggcgaatgcgccgaaatcggccgctacccagcaagatgtgtcagcggataatgaatcagcggaataacgtcgaatttttaaggaattttcatggcaaacagtaatatgcaggcaaccgacgcggttgctcaggataccgcctccgcatccggtgaatttgatgcgttgctgaatcaggccttccgacccaagactacccaggcggcaaaagccgtggaagccgcggtgcagacgctggcgaacacgatcaccgtcagcgatgacgcctataaaagcatcagcgctattattgcgcagatcgactttaaactgaccgaacagatcaaactgatcctgcaacatcccgactggcagaagctggaatcctcgtggcgcggtatggagcatctggtttacaacaccgagaccgacgaaaagctgaaaattcgcttcatgaatctgtcaaaagatgaattgcggcgcaacatgaagcgttacaagggcatcgcctgggatcaaagcccgatgttcaagaaactgtatgaagccgaatacggccagttaggtggcgaaccttatggctgtatcattgcggattactacttcgaccatacaccgcccgatgtggatctgcttggctctatcgccaaagtcgccgcgtcggcccatgcgccgtttattgccggggcttccccctcggtactgcaaatggactcctggcaggaactggcgaatccccgcgacctgaccaaaatcgtcacccagaacctggaatatgcgccgtggaactcgctgcgggctagcgaagactcccgttatattggcctgacgatgccgcgttttcttgcccgcctgccgtatggcgcaaaaaccaacccggtggacgagtttgattttgaagaagatgcggatggttctgaccataccaaatacgtctggagcaacgcggcctacgcgatgggcgtaaacatcaaccgttccttcaaacactacggctggtgtacgttgattcgcggtgtggaatcaggcggtgcggtggaaaatcttccctgccataccttcccgactgacgatggcggcgtggacatgaaatgcccgaccgaaatcgccatctctgaccgccgcgaggctgaactggcgaaaaacggttttatcccgttgatccaccgtaaaaactcagactatgccgcctttatcggcgcacagtcgctgcaaaaaccacaggaatactacgatccggacgcgacggccaacgctaacctgtctgcccgtctaccgtacctgttcgcctgctcgcgcttcgctcacttcctcaaatgtatcgtccgcgacaaaatcggttcctttaaagagcgtgaggatatgcagcgctggctaaatgaatggattatgaattatgtcgacgccgatccggtgaactcctcgcaagaaactaaagcccgtcgtccgctggctgccgctgaagtagtggtggaagaggtcgaaggcaatccaggttattacgacgcgaaattcttcctgcgtccgcatttccagcttgaagggctgacgggatcgctgcgcctggtgacaaaactgccgtcagtgaagcagggcaatgcctgatatatattttgtgaatgtttaagcgagtgaagtcagagaagatagagaatataaagagggatatgaagaaaagaatttcgtctcgcccacggtctcgtaaaggtggggtacgtaatgatgacacatatccgaatgccagtaacaatgccgaagctttttatatcattgagtaggaaatacatattatgaccataagcccaacttttcatctgttacctggtattgttctgctcttttcacaatatgctgtagcctgggaagtcagttgcccggctgttattgatactcagtcttctgctgtgagcctgaagtctgatgtcccagcggcgtggcagctttctccccgatatatgtcgcgtttatggttaagtagtattggggtaacgcagggtaaacctgaaaacctgatggatctcaaaccagagactaaaaaagtaaacggtgaaaattggtctgtatgggaaacagaacgtggtagcgataaagaaaccgatcgctattgggtttcgtgtatttatggtcatgaacagatatggttgacgcaaccaatacctgcttcttctactcgctgtaagactcgtaattttgagggatcgccagaagaccagtctgtatcttttatctgtaattagcgatttgagacgtgaaaatttcagtacaggttatggtttttattatcggaagttatgaagcattatttatatgcattaaataatgcaaattcataaaataactaaatacattatcggtaccggaaaaatatacagtcctctgttctcctgaagttattggagaaggattctgtacggcaatgatttatctataaacaaaaagatatagataaaatcaggtttattttaagtaaaacttaataaggatataaaaatggcttatgacatttttttgaaaattgacggcattgatggcgagtcaatggatgacaaacacaaaaatgaaattgaagtactgagctggcgctggaatattcatcaggaatccaccatgcacgccggtagcggcctcggctccggtaaggtctccgtcaccaacctggattttgatcactatatcgaccgcgccagcccgaacctgttcaaatactgcgcctccggcaagcacattccgcaggccattctggttatgcgtaaggctggcggcaatccgctggagtacctcaagtataccttcaccgacctgattgtcgccgtggtttccccgagcggcagccacgatggtgaaatcgcctcccgtgaaacggtggagctctccttcagcaccgtgaagcaggaatacgtggtgcagaaccagcagggcggcagcggcggcaccatcaccgcaggctacgacttcaaggccaacaaagaaatttaacggctgtttttccggccagatgttatgtctggctggttttattgttttgattttaaaggaatttacagtgaataaatggcgtaaccccactgggtggttatgtgcggtagctatgccttttgcactgctcctgctttccggatgcggcagtagcgattcgctacttgacccctaatcgcagcggcctggcctgagcgtgaaagcgttttacaaggtgaattctgacaatcagaagaaagcggcgtccatgaagatacgtgttgagaattaatgacctacacagaatttttagaggttaagcaaaatgaacagaccttcattcaatgaagcgtggttagcttttaggaaggtgaatcattccgtcgctgatgtgggtagcattattggtggaaacgttgggaaaaatataactggtggttattttcaaaatgcctgccctattcgaatgagctatgttttgaatgcgacagggttcccaatagcccgtaactctccgtatgcaaaggttagtggtgccgataataaattctatatttatcgcgtgaatgatatgattgattatcttactcatactatgggcaagcctgatcttattgttaataatccgaaacagagtgactttatcgggaagaaaggaattatcgtagtaaaagggcatggctggagcaatgccagaggacacgttacattatggaatggcagtatctgttcagatcagtgccacttattaaatgacccagataatggaccatttgttcctgaagttgggacactgtggatactgccgtgaaatggttaatattagttactttcagcataagtggaatgctggtatggcagccatcctttgcacaagaagcattgaccacacaatattcacagtcggaactcttaaaaaattgggcgctgagtcattgtctggcattagtatacaaagatgatgtcgttaaaaacgatgccagagctacggccagtgcttaccttgaatatggtaaacaatctgtggagatttaccatgaaattgatgagattgcgaaaaaatattcagggttgaaatataacggttcgatatcatcagattttaataccatgaagtgcatagattttatccatgacagggaattaaatgaattaattaaaaggcgtgtcgagaagtaaaattcaaagatattaaaagcatacgttctcttgctctgatgaatttatgggtaagaaagagctgtacaggaatagttaatctgttcacctaataaagcagataaatcagggcttaatttaggtagttaaaaggatagtagatatgtcttatgacatttttctgaaaattgacggcattgacggcgagtcaatggatgacaaacacaaaaatgaaattgaagtactgagctggcgctggaatattcatcaggaatccaccatgcacgccggtagcggtctcggttccggtaaggtctccgtcactaatctttcatttgaacattacatcgatcgcgccagcccgaacctgttcaaatactgctcttccggtaagcacattccgcaggccattctggttatgcgtaaggctggcggcaatccgctggagtacctcaagtacactttcacagatctgattattgcaatggtatcgcccagcggaagccagggaggggaaattgcgtctcgcgaatcaattgaactctccttcagcaccgtgaagcaggaatacgtggtgcagaaccagcagggtggcagcggcggcaccatcaccgcaggctacgacttcaaggccaacaaagaaatttaacggctgtttttccggccagatttatatctggccggatttattattttgattttaaaggaatttacagtgaatgaatggcgtaaccccactcggtggttatgtgcggtagctatgccttttgcactgctcctgctttccggatgcggcagtagcgatgcgttacctgacctcgaatcacagcgactcgacctgagcgtgaaagcctccgataaggtgaatcctgacaatcagaagaaggccgcgcccattgagatacgtgtttatgaactgaaaaatgacgccgctttcacgacagctgattactggtcgctccatgacaacgacaaatccgtccttaccgacgatttagtgcgtcgcgacagctttattttgcgtcccggcgaagagaaaaaactgcgtcgcccgctgaatgcgcagaccacggcaatcggcgtactggccggataccgtaacctggccaaatcggtctggcgggtaacctacaaaatcccggaagccccggaaaaagcctggtacagcagcttcatatcggggaaaggaaaagtgcagttggaggcggaactggaacaaagcgccattgtaattacggaacgggataaatgaattatgagctggaatgaccgcgtagtctggagtgaaggacaatttttactgccgcagatgtttcagcagcaagagcgttatctggaacacgtcatgcattaccgcagcctgccgctgaccccctttttctggggattcagccactacaatattgatggcgaagcgctgaacatcggtaaactgatactgaaagaggcatcagggatttttcctgacggcacgccgtttaacgcaccggaccacaccccgctgccgccgccactgaccattctgccggagcacctgaaccagcagatttgtctggcggtaccggtacgcgcgccgaacagcgaagaaaccacgtttgacaataacccggaatcattggcgcgtttctcggtacatgaacacgacatccgcgacgccaactcgctgggacgtggcgcgcagttattacagctcagtcatctgcgcctgcggctgctgccggaaaaggcggtgacgggcgcctggattggcctgccgttgacccgcatcaccgggttgaaccctgacgggcggatagatatcgaccacgacctgatcccgcccatcattaattatcaggccagttcactgatgtgtacctggctgtcgtggatcaacgatctcatccggatgcgggccgattcgctggcggaacggctgaccggcagcgacaaccacggccatgaagcagcggaggtctccgattacctgctgctgcaaattctcaatcgctttgagccgctgctgactcacctggcgaaaaccccgctggccccggaggtgctgtaccgctacctgtccgaactggccggggaactctccacctatgtgcgtccacaaacgcgacggcccgctgaatacaaagagtacaaacacctgacgccctatgccgggttgaaatcgctggttgatgaggtgcagttcctgctgaacgcggtactgatccggggcgcgcagcgcatcgagctgaaagaggggacttacggcatcctgaatgcggtggtggccccttccgatcttgccgatttcagcacgctggtactggcgataaaggcttcaatgccgaccgatgtgctactgcaacattttgccgcccagaccaaaatcgggccatccgatcgcctgccggaactgatccgctcgcatctgccggggctggctttgcaggttctgcctgtaccaccgcgccaaatcccgtttcaggccggatacatctattacgacatccgccgcgagggagcattgtgggaacacattgcccgttacggcgggatggccatgcataccgccggggaatttccggggctggagacagaactgtggggagtgcgcgataaatgacagacagtaccctgacgccgccagcggcggatatgatgtcctttttgtccaccacgccggaacataaggacagtgaatatgaaacgccggtacacaccagccagcgcacggaactcaatgtcatcgttgaagacggtccggacagcaaactccggctggctgaaatcagcgcggcggctaacccgttgctcgccgctgcccggcctttattgtgcgctctcgcagccatgcccgctaaactggatgcggccctggtagagccttaccgtaatctgctggtacgcgagatgcatctgtaccagacattatgcgatcaggcgaacctgcggcgcgagcacgtactggcggtacgttactgcctgtgtacggcgcttgatgaagccgccaataacacaacctggggacggcgcggcgtctgggccggaaaaagcctgctggtaacatttcatggtgaaagcgaaggcgggataaaacttttccagatcatcgggcgtctggcggccagcttccaggagcatggcaacgtactggaggttatctaccacctgctggggttgggatttgaaggccgctacagcgtgcagccagacgggcgtaagcaactggacaatattcgccagcaactgctgacacagctttcacagcgtcgcgatccggttatgcccgcgctctcgcctgactttcagggggcgataagcggacgactgcggcggatgcgccgggtgccggtctggctgagcgccgggatagccctgttggcgatgctgacgctgtttggcctttacagccaccggatggatgtgcagaccgtcaccgtacaacagcatattgatgcgattggtataaaactgccgccgccgcctgtgccggttcataagctgcggctgaaaatcctgctggcaaacgaaatcgcccgtggcctgctgaccgtggacgaagatgaccagcacagtagggtggtcttccgtggcgacgccatgtttgtgccgggacagaaaacggtgagtgacgcaatccggccagtgattaacaaagcggcgcgggaaatcgcccgcgtgggcggcgcagtcactgtaacgggtcacactgacagccagcccattcattcggctgaattcccatccaacctggtactgtcggaaaaacgggcggcggaagttgcggcgttgctgacctccggcggcgtacctgccggacgggtacatatcgtcggcaagggcgatacggtgccggtggcggataacggcagtaaagccgggcgggcgaaaaaccgtcgggtggaaattctggtagtggagtgaatgaatgatgaaaaaatcaacctatgatgtgtctcatcattcggcagtatgtggcgtgacgggggattattatcggatctcagcgacatatcacataacacgatctgttcgtgtttttttgatcatcttatgttgcctgttatccggtggcgcttttgccggatccccgattaacgcaggattcatttcccccgataatgtcaacctcagtactcaggatttcctgaaattttatgccactgacaacgtacagaaaaaagacaatgcactgatgtatatgctgggggtggaggatgcgacagaaggtaaagcctggtgtggatatggtcaggttgacagtataacaataaaccatactgtgctgacctggtttgaacagcacgcagtgaaaaagcctgatgtaagggcttcaatactaatagaggaagcattagttaaaaattttccctgtcagaggacagactcctccataaaaattgcttcccggtcatctcccattttatccctgacgccggatgcgcttaatctttcaggtaatgacttttttaaattttgggtgtctggtaatcaacgggataaactcagggcgggtgtctatctgctcggcgtggaggatgcgacagagaacaaactgtggtgtggatacgctttatttaagacgctaacattaaatgaattagtctatgtttctcttaaaaataaaaccaatgaggaactgaattctcgcgcggctgaacttatcataaataaattaatagagtatccctgtaatatataaaatcattcaagttgcatcaaggcggcaagggagtgaatccccgggagcgtacattagttcgtgactggggtgagcgaggaaagccaacgcacatgcagcctgaagtatgacaggtataccctgtgataatgttatcgctgccagttcagataaagtcttggtggtaaagtcttggtggtaagatattgatatgtttaaggtaatggtctgtctgttggtgggtgttcctgccatttcttatgcgcacgattatgggtgtgctacggttggagcatcaatggagtcatcattatttgatgccataaaaaatgacctgaatatagatgtcgctactattataaaggataaaacaaaggtagagattcttgatatctcacctgtatctaaggtctatgcagaatctctggccaggatggattatgaaaaagataaggccaaaaataaagtggcaatattagataaaaaatcctatttcgatagttactatgaaaatcaggttaaatctatcgtggcaaaatatacctatattaacaaagataaagaaaaagatattttcattgcatccagcttcatgaatgctgatgagtgttctgtaagatttaatggttatattactttatccagggaattttaaaatattgattattgggtggcgagtcgaaatataatgcaaaaatttcttagtctgcttttttcccggcgcgcgctggcagttgtgggcgttctggttctggcgctgctggtctggtttgtcgggccgctggtgtcatttgataccctgcgcccgctggcctccgtgggtagccgggtagtgaccattgccctgttgctgatgctgctggtactgtggctggtcaactggtcgatgagtatcatcggcatcagtgtcctgtgcctggcgattggcttcgtcacaccgctgctggccctgggcgatgtccatccgtttgcgccgctgtgggtccgcctgaccctgattggtttcatcctgctgatgtacgcgctgtacggcctgtaccggctgtggcgtgcgctgcgtatggatgaacaactgctgcgtcgcttcctgcatccgcgcggggaagaggtaccggtggcaggcgagatcaaagccgacctgcgcaccgtcaaccatattgtcacgcaggccatccggcagctgcggcagttgcgggtggatatgcctggctggcgtaaaatcttcgagggaaaacgctttctgtatgagctgccgtggttcatggtggtcggcagtcccggcgacggcaaaaccacggccctgctgaacaccggattgcagttcccgctggcggagcaaatggagcagacttcgcgcatcctgacagtaccgggtggcggcacgctacactgcgactggtggtttaccaacgaagcggtgttgattgataccgccggacgctacgcccgccacgatgacggtggtgaagcgagcgccgcgcagcgtaacgccggagagtggcagggctttctcggtctgctgcgtaaacatcgccccggcgcgccgcttaacggcgtgatcctgacgctaaacgtggcggatttaaccgcacagtcaccggcggaacgcctggcggcctgcgccgctctgcgggcgcgactggcagaactgcgcgagaccctggggattcgctttccggtctatctggtggtcaccaaaatggatttgttgccggggttcagcgaatattttcgcacgctgaccagccatcttcgtgcacaaatctggggcttcacgttgccgtacagccgcaggcgaaaagcgggcgacccgcaggcgctgcacgccgcctgcgcgcaggagctggcgcgcctgacgctgcggttggatcagggactggatacccggttacaggaagagtacgaccttaaaagccgccagcggctgtataccttaccgcgtgagttcgccgccctcggcgagccgttgctggaggctattgaacagatcttcctcgattcaaaattcgatgccacgcaactgaataacacgctgcgcggggtgtttttcaccagcgccgcgcaggcgcaggccgacgccgtggccgaccagttgagtatctggcagcgctttgtccgggcgataaaaaccgcccgtggcgaatcctccgcctctctcccacacgctctgccggacggcaaccgcagctacttcctgcatgacctgctgacacagtttatttttcgtgaagcgcacctggtggagccaaacctccagtgggcctggcgttaccgcctgctgcgcctcggcgggcacctgctggtactggtgctggcattcctgttgtggcaggggatgcagaccagccagcagaccaacggcgactatctgaatgaaatcagcgcccgcgcgacccggctggacggtgatgtgaaagcctacaccggtaaaccggcgatggctcccgtcccggcactgctggacagcgcaagggaactgtccgcctggccggaactggacccggacgcgccgccgctggcctggcgctacggtctgtacagcgtaccgccggtaaccgacagcgtggcgtcgctgtacaaccgtctgctggatcaactgctgctgccgccgctggtgaaacggatggagtatgtgctggcggacgccattgcccgtcaggatagtaaagcggcctacgatgccctgcgcatctatctgctactgaatctggataaagatcacgaagataaatacaacgcggcggagatccagtcgtgggtgattaacgatctggggaacagcgacagcgtggccgggttcggcgggcgcgccgccgtgctgacgcatatcgaagcgctgtttgacggcagccgggtggtgcattcaccgtatgagaaagatgaggcgctgatccgccaggcgcgggcattcctcgacggtcacaccagtaccgagcgtatctacgcgcgggcgctggcggcaatggagagcgaagcgccgcaggagttcacgctggtacgcgccgtcggcgcggatgcgggaacggtctttgtgcgtagcaacggcgcgccgctggatcggggcgtgccgggtatttttacccgtgaaggataccgggagctgttcgacaaacgattaccggaatttgtggcggcggcgacggcgaacgatggctgggtgatgggccgggagagtacgccaaaaaagctgactgacagcctgcgcagccagataccggggcaggagcagtctgtcgcccgcgaagtccgccgtttgtacctgacggaatatgcccgccgctggcaggattttctggacagtatccatagtatcaacagtgccggggaagagggcagttccggcctggcctatgatttacaggtgctgcgcaccctggcgtcgccggactcaccgctgatgcggctgggaaaagcggtggtggagcagaccacgctggtgccgccgccggacccgcaggccagacagaaacaactggcgcagcgcgcatccggtaacgcggggaaagtggtacagacggcaaaactgttccaggatattcacccggaagaacggctggaaaaaacgctggtggatgatcgtttcgccgcgctgcgcgaggtcattgccgggcggacggacggcggacagagcggcggtgggacgatgcagatcgcttcgctgctgaccatgctcaacgagtattacacccaactgaccattgctgatagcgcgctggcggcggggacgttgccagcgcgcattactgccgcagacaagttgcaactggaggcggcgaaactgcccgcgccgctgaaaaacatcctgctggatctgacgaagcagggaacgcgcaaaatcaacgccgggaccggcgacgtgctgaacacccagatggaggcgatgatgggcgacgactgccgtgacgccatcgacgggcgctatccgttcgccgacagtccgcaggaggtcagcgccgaggactttaaccgcatcttcgccagcggcggcgtactggatgctttctggagcaaacaactggctccgctggcggacaccgccagcgacccgtggcgctacaaaccgaccgaaggcaacatgacattgcaggggccggatctgacgccgtttcagcaggcgaagcagatccgcagcgtattttttaacagcgagggcgggaaaaaattttcctggtcgatgcagattagcgtggtggatatggacccggccatcacggaactggtgattgatatcgacggccaggtgctgcgctacgcccatggtccggaccgtcccctgaaagtaacgtggccgggaccgcgcaacggctcgatggcggaaatcaccgccagcccgcgtattcgccaggacacctcaacgctactgaccggcgggccgtgggcgctgtttcatctgctggacgccggaatggtacaggaaacggcggtgcgggggcgtcaactggtggaatatgattttgacggtcgccgggtggtgctggaaatcaccgccgggcgggattttaacccggtcagccgggagctgttgcagaacttcagttgcccggcgagggcgctgtaatgcgccggccagcagtggtatcagccccggcgatgttcggcaggctgccggaccagcgcgactatgtgcgctggcgagtgggcgctgaagagggacgaatatggcaggactggctgaaccgccagacgtgggtgggcagcgggcggcatatcgtgttgccgggaggccagacgaccgatgaagagcgtgacggctggatgcacctgtcgccgcgtggcgaacatgatatgcccgcgccggaacaccatccgctgccgtggagctttgtgatgtcgccgggatttttgccgatgggtgggacgactgactggctgaccggagtgctgatggcgtcacgggatagcgtgggacgcccgtggccgctggtgatttaccagcgctgcggtcgggagtggctggacgagagtttgcaggagacgcagggctggctgtactggctggcgaggctggcggcgcagcatatcacgccggacacgatgcggcgcgggcggctgaccgagcaggtggaccagctatgggcgatgtggcagccggggccgtggtgggcgcagtggctgcgtgggttacgacgtacatcgcaacgcagccgggaactgaccgggctgccggatgaagcaccggtagtagaactgccgggcgtgcgttatctgccgtggccgggctggccgggtaagacgctggggcaggcaacaccggggcaaggctggttctggcagcagaacagtgaagggcggtatgtggatgcgctgcggttggtggatgaaaaaaatagaggtcagatgctgtgaaaaagtacgctgtagaggttctgtttatgtctgcctgtgcaggaatgttcctgcccgtatttgcctggggcggaacagatgtaaacattgataacccgctggcggagtgtgtggatatccatcccgttcatcgtcaggaaatggataaccttaccattctgaaaacaacggtcacactgaaaaaaagcaccggtgaatgtggctgtttctcaacattaatcaactataccagcttactggcgcaggatgttgagggttacggacgcggaagtgcatattcccttcaggaggggaatatctcactggcgaagatgcagggacgttatcctttcagctttgtattatcggtggataaccagtctgtacgggatcagaagctggcgctaatgatacgttgtacaccaccgctgtaatacacagaatagtcagggagaagatgatggcagtaagactgacttttgacgggcaaaagctgacatggcctggtatcgggatatttaaggcgaccacggggttaccggatttacagtggccagataaacagtgtgtgccggatgcggcgataccggaagggaattataaattgtttattcagtttcagggggaggcaccgataagaaatgctgcggattgtgatctgggaccatcatggggctggagtaccattccgcgaggccaggctgccggaacatgtgagatatactgggcgaactggggatataatcgtatccggctggaatcagcggatgagaagacccgaaaagcctgtgggggcaagcggggtggtttttatatccatgattccaccaaaggttacagtcatggttgtattgaagtggaaccggtgtttttccgtattctgaaacaggagacggaaaaagaaaatggtgaaaagacatttacggttaatgttaagtatgtttctggtcagcaaacgaatggtggaacaaaacaataataccgttaaaaccggatgaaattatcgtgtctggacgtgctgtggttgacaatgattacaatggtggccagataagtaatgagcaccaatgataaagtatatgactggcggtgtgctggttattaatcaaatttctataaaatgcaatgcgaatctggtaagcgtaataaaaataaaatcataatattgttatgttcatttccttatttatgtaattcagtatttatgttatgtgctaatttttgtgtttttattttcatggctcttgtcagcaatataccctgttcttctggtaaatatttaaatataacaggctggttgcattataaagtgcggggcactgtttcctgacggtgagtctatttattttaatccggtattaaaggagtcactaccatgagttttgtatccacaaataataaatccggtatgggagggctgacgacaaccacgccgccgataaccggagaaagtggcggtgtcaccgcagattcagtcgccggaagcgtggcagatgcggcggaatccgccgtggaacaggctgcgggatcgctatttggcgcattgccggagccatcaggactggtgaaagccgcggtagcagcggcgcaggctgccgccgccgcaggtatggcgcaggatgcggtatcggccatcgtctctgctgttgcaggcgggccgggggcgcataatgtgacggtcagcggcagcgccgtaccgccgggcgcattactgttcgccagcctggacggcggcgaaacattaagtgaactgttcagctatgtggtacagctaaaaacgcccgacaccctgaatctgggctatgtctccccggcggccaacctgccgctcaaaccgatggtgggcaaagatctgtgcgtcaacatcgaactggatggtggcggtaaacgacatatcagcgggctggtcacggcggcgcgggtggtgggccatgaagggcgttcggttacctatgagctgcgtatggagccgtgggtaaaactgctgacccataccagcgactacaaagcattccagaataaaaccgtggtggatattctggatgaggttctggcggaatatccctacccggtggaaaagcggctggtggaaagctacccggtacgcacctggcaggtgcagtacggtgaaactgattttgattttcttcagcgactgatgcaggagtggggcatctactggtggtttgagcacagcgaggacagccacacgctggtgctggcggatgccatcagcgcccacaaagcatgtccggactcgccgctggtcgagtggcaccaggaagggctgaagctggacaaggagtttatccacactatcacggcaaacgagagcctgcggactggacagtgggtgctggatgatttcgattttacgaagccacgttcattgctggcaaacaccgtggcaaacccgcgtgaaaccggtcatgccacctacgagcattatgagtggccgggagactacttcgacaagagtgaaggcgagatgctgacgcgcattcgtatggaagcgcagcgcagccccggcagtcgggtgctggggggagggaatatccgcacactcatgaccggttataccttcacgctggaaaactatcccaccgccgaagtcaatcaggaatatctgctgatgcagaccttgctgtttgtgcaggacaacgcgcagcacagcgggcaggaccagcactttaccttttccacccgttttgaactgcaccccacccgcgaggtgttccgcccgcagcggacggtgagcaaaccccacaccaaagggccgcagagcgccatcgtcaccggcccggcgggccaggaaatctggacggatcagtacgggcgggtaaaggtacagtttggttgggatcgctacggcaaaatggatgaaaacagcacctgctggatacgcgtcagctacccgtgggcgggcaaaggcttcgggatgatccagatcccgcgtatcggccaggaagtgctggtggatttcaaaaacggcgatccggatctgccgatcatcgtggggcgtacctacaaccaggacaccatgccgccgtggggactgccgggaatggcgtcgcagagcgggatcttcagccactcgctgtatggcgggccaacgaacggcaacatgctgcgttttgacgacaaaacgggcgcggaggaagtgaagttccacgcggaaaaagatctcaacaccacggtgaagaataatgaaacgcatacggttatggtggatcgcactaaaaccattattaaaaatgaaaccaacagtattggtgaggacagaaacaccacggtaacgaagaatgacggcctttccgtaaaactggcgcagacgatcaatatcggcaccacttatcgtttagatgttggcgatcaattcacgcttcgctgcggcaatgcggcgcttgttttacataaggacggctccattgagttttgtggcaagcaactgatgttacataccagcgatgtcatgcaactgattggtaaaggtattgatatgaacccggatggcggcacagccgtaaccgccgatgatattgccccccttctcacctctgagtgatctgaattaaacctggagttctcatggatcgaccataccgcatacaggaagggtgttttgtcctgcctgaaacatttacggatcgcagcgtcaatatttttatcctggagggcaatgaacgaacatcgcccagcctgaatatttcccgcgatacgctaaaacctgatgaagacctgcccgcctatattgaccgccagattgcactgatgaaaaaaaatctcggtcagcaccgggtattgtcgcgagcgcctgcacaggcaggaacgggcaatgatgcccttatgggggaacaaattgccgccacccataaatccgggaaaacggaagtgtaccagcgtcaggccgggtttattgcaacccctggcaaggtactggtcttcaccctgaccagtccccgtccttttgatgataaagcagacctactctggaacacctggctggcaggctttcagccggataaaaacgaataatcacacggaggtgtgaccatgtatgaagcagcccgtgtggatgatcctatctaccacaccagcgcgctcgccgggtttcttatcggcgctatcatcggcatcgccattatcgcgcttgccgcctttgccttctttagctgcggttttcttgccgggctgattctgggttttatggccgatcaaatagcctccggggtattgcaactgggcgaggccatcgggcgctccatccaccacacggcaggaaaaatcctcaccggttcggagaatgtcagcaccaacagtcgcccggcggcgcgcgcggtactgagtacggtgaaatgcgataaccatatcgcagaaaaacgcatcgcccaagggtcggaaaatatctacatcaacagccagcccgccgcccgtaaggatgaccacaccgaatgcgacgcggtgattgaagacggttcgccgaatgtgtttctcggcggcggcacacagacggtactggaaatcagttctgaaattccggactggctgcgcaaggtggtggatgtattgtttgtcgtggcgagtctgctcggcgggctggccggggcgtggcggcaggcggcaaagctggggacgaaatttggcactaaatgtgccgctaagtttatcggcggggagcttgtcgggatggccgtgggtgaggctatcagcgggctgttcagcaatccggtggatgtgaccaccgggcagaaaatcctgctgccggaaacggacttcaccctgcccggtcgcctgccggtcacctgctcgcgtttttacgccagccacctggaaactgtgggactgttgggacggggctggcggctgaactgggaaaccagcctgcgcgatgacgatgaacacatcacgctgaccggcgtacaggggcgggaactgcgttacccgaaaacgatgctgacgcccggccaccagatatttgacccggaagaacagttatacctcagccgcctgcatgacgggcgttacgtgctgcattacaccgatcgcagctattacgtatttggtgattttgacagtgacggcatggcatacctgctgtttatggagacgccgcaccgccagcgcattgtcttcgggcacgaaggaggcagactggtacggatagcctccagcagcgggcatcacctgttactgcaccgcacacagaccccggcaggggagcggctgtcgcgaattgaactggtgcagggcggcacccgtggcaatctggtggagtaccggtatgacgataacggtcaactgaccggcgtggtgaaccgggcgggaacgcaggtgcgtcagtttgcttatgaaaacgggctgatgacggcgcacagcaatgcgacggggttcacctgccgctaccgctggcaggaactcgacggcgcgccgcgcgtgacggagcacgacaccagtgacggcgaacattaccgctttgactatgattttgccgcaggcaccaccaccgtcaccggcaggcagggggagacatggcagtggtggtacgacagggaaacgtatatcaccgcgcaccggacgccgggcggtggaatgtaccgcttcacgtacaacgaagaccacttccctgtcaacattgagctgcccggcggtcgcacggtggcgtatgaatatgacatccagaaccgggtggtgaagacgacagatccggaaggccgggtgacgcagacgcagtggaacggcgagttcgacgaaatcacgcgcacggcgctggacgatgacgctgtctggaaaacgcagtacaacgcccacggccagccagtgcaggagacggacccggaagggcgggtgacgcagtacgcttacgatgaacaggggcagatgtgcagccggacggatgcggcgggcggcacggtggtgacggcgttcgacagccgggggcagatgacgcggtacaccgactgttcagggcgcagcacaggatatgaccacgatgaggacggcaacctgacgcgggtgacggacgcggaagggaaggtggtacgcatcagctacaaccgacttgggttgccggagacggtaaactcaccggggaaacagcaggacaggtatacctggaatgcgctggggctgatgagcagccaccggcgcatcacggggagcgtggagagctggcggtatacgccgcgcggtctgctggcggcgcacacggatgaggagaagcgcgagacgcgctggcagtacacgccggaaggccgggtggcagcgctgaccaacggcaacggggcgcagtaccggttcagtcacgatgcggacggcaggctggtgcgtgaggttcgcccggacggactgagccgtacttttatcctggacgacagcggttatctgacggcgatacagaccacgggcacgcagggcggcgtgcggcgggagacgcagcagcgggatgcgctgggccgtctgttacggacggagaatgaacacggccagcggacgttcagctacaaccggctggaccagataacggcagtgacgctcacgcccacggaggcggggcaacagcagcaccggatgcaggccgacacggtgcgttttgagtatgaccgcagcggctggctgacggcggagcacgcggggaacggtagcatatgttatcagcgcgacgcgctgggcaacccgacggacatcacgctgccggacgggcagcacctgacgcatctgtattacgggagcgggcatctgttacagacggcgctggacggcctgacggtgagcgagtatgagcgcgacagcctgcaccgtcagataatgcgcacgcaggggcagcttgcgacgtacagcggctatgacgacgacgggctgctgagctggcagcgcagtctggcgtccggcagtgcccctgttcttcctggccagcgcccggcgcggcagggctgcgtgacgtcgagggactattactggaacaaccacggcgaggtgggcacgattgacgacggcctgcgtggcagcgtggtgtacagctatgacagaagcggttacctgaccgggcgctcaggtcagatgtatgaccatgaccgttattattacgataaggcgggcaacctgctggataacgaagggcagggagcggtgatgagcaaccggctgccgggctgtggtcgtgaccgttacggctataacgagtggggcgagctgaccacgcggcgcgaccagcaactggagtggaacgcgcaggggcagctgacgcgggtcatcagcggcaacacggagacgcactacggctacgatgcgctggggaggcgaacccgcaaggcgacgtacgggcggcacacgggccatacggcgcggagccggacggactttgtgtgggaggggttcaggctgttgcaggagaacgtgcagcagcagggctggcggacctatctgtacgatgcggaacagccgtacacgccggtggcgagcgtgacggggcggggagaaagcaggcaggtgtggtattaccacacggatgtgacgggcacgccgcaggaggtgacggcggcggacggaacgctggtgtgggcggggtatatcagggggtttggagagaatgcggcggacatcagcaacagcggggcgtactttcaccagccgctgcggctgccggggcagtattttgacgacgagacagggctgcattacaatctgttcagatattatgcaccggagtgtggacggtttgtcagtcaggatccgatcgggctgaggggcgggttaaacctttatcagtatgcgccaaatcctctcaaatatatagacccacttggtttaaccgcgactgttgggcgatggatggggcctgcggaatatcagcaaatgcttgatactgggacagtagtacaaagttcaacagggacaactcatgttgcctaccctgctgatatagatgcttttggtaagcaagcaaaaaatggtgctatgtatgttgaatttgatgtgcctgaaaaatcattagtacctacaaatgaaggatgggcaaaaatagtagggccagattctatcgaagggcgattagctaaacgcaaaggtttgcctgttcctgaaatgccaacagcagaaaacataactgtaaggggcgagaaaattaatggggaagttgaagcaaaatgctaaataaatttaaattgtgggtgagcaaacatactgattatacggtaattcataatgaaaatgatttatcttacagtattattatagattttgaagatgaccggtatatatcaagatttactgtatgggatgacctaagctgtatgtcagaagtaatggatgtggatactggtttatataaattaaacaagagaaacgaattttctacatttgatgaacttctggatatatttgatgattttatgataagtattaaataatagttggccgggtaagaagttaactcttcccggctgttttattatctaacccccatcaatccggagacgcgctaccggtacgatgcgctgggcaggcgggtgagcaaggcgacgtacgggcggcacacgggccatacggcgcggagccggacggactttgtgtgggaggggttcaggctgttgcaggagaacgtgcagcagcagggctggcggacatatctgtacgatgcggaacagccgtacacgccggtggcgagcgtgacgggaaagggagaaagcaggcaggtgtggtattaccacacggacgtgacgggcacgccgcaggaggtgacggcggcggacggaacgctggtgtgggcggggtatatcagggggtttggagaaaatgcggcggacatcagcaacagcggggcgtactttcaccagccgctgcggctgccggggcagtattttgacgacgagacagggctgcattacaatctgttcagatattatgcaccggagtgtggacggttcgtcagtcaggatccgattgggctggcgggggggctgaatctttaccagtatgcgcctaatccgattagatggatcgatcctttaggacttgctatcctggagcatcaatctaattttgatgcggcaaggagaaccggatttgaaaatgcgggtatgacaaaccctgaggatgtcactttctcgaaagtcgatcccaaaactggtactgttgttgagtttaaaggtccaaatggggctaaagttgcttatgatgcacctcatgcagatatggatgtgacagcagggcatgataaaccacatgttggttggcaatccgcaggaaaaagaggttccggaggagctaatagaggtaatattacttatgatggcccacaacatccgcatcgctctgactctaagggagatgataaatgttaaattcaaatatgtctgaacttagaatcgaactggagaatgcgattaaaaatctcggtattcatgattatcgtgtcgataaacccgaacaaatcgtttctgagataaaagagatatatgttaatggtaatcctagaacctggtggttatcattaaaacatagacaatatgtcttttcttataccgataattctggatataaaaacatatcacaaatagtaagtaaacaactcaatgaaagcaatgtaatcaacaaacatatatttttgattgctgatgaagataatgagcaaatatatgtatataacgttcctcttaactccctgcctgaaattatagaaaattgcagatattttgaatattatgttgcagatcatgaactatcttggcttatatgtgaaaatgatcatggtgatttgattgtatgctcaaccattaagtaaagcgcgagtgctctttagcgatatagttgcccatatttaggcgttactagccgaagatggcgcgattgtctggcaggggaaacagcaattctgaggtcaggaagatagcataacccattaaccgggatagatccgctagacctgaatccagttgatgcgacaggttatagggtttatggttatttgctcctggagcaaataaaccttattacattggtattactaatgatatggtttgacgaagggccgagcattaaagcactggcaggttatcaaaagaaaatggaaggatgctgccatttgatgaaaatgtaatctaatggaaagtcagaggttacgagaaatattatatagagaaatataaaaccagaaccggaaccataggtgaaaaaattccctcaacaaatagagagaataaatataattcatttgatcatgggcgaacagatcccagcgcacaagcatttaaagactcttaaaatagtaagggagttggttccggtggaggaaaatgcggatgagtgattaagaattttggggctgtgataagaagtcgagaacaatgctgcgttttgtgaagcccggagacatattttgttttaaattagatgaagatagatattgttttgggcgaattataacactaatgactgtcggacatctttctgaattatttgatataattaaaaaaccccctggaataacagagttagaaattagtaatgcaaggcgaattattgaaccaattatagtggatacatattctttatttgataagaaattagaaaatggaagtgactggagaattattggtcatcaggttaattacaatccaaaaaatttagatggtatctattttgcacttggaataggtgattcctgtaaaaagaaagactgttacggaaatgattttctcatttcagaaagtgagtggaaaacacttcctaaattatctcctaaagggggttttgatatcaaaaaacggcttgaaattgcctgaaaatgaaaataaaaagccgggaaagatcttttgtcttcccggattttattatttaatccccgttcaccacattatttacccccgccttaatatgcttcatcgactttttcacctgataaagctccttccgtagatccctcacttcgtccgtctctgcaatcaggatcaaacacccctcggagatcttcacggtgacgccgtgcccggtctcaaatcccgcttcttcctgccagtcacccttaaggtgctggctggggatttgtgagtaacaggcggtcatgcaggtttcgctgttgatatggcggacgctgacgccggaggcattcatatttgctgactaaataaattcttatttatccgccggatgctggctgattgtggagctcagggtgagtgagtatgggcgcgacatcctggcaccgcgcctccctctccccggccagccccggccggtgatgagcagccggctgccggggccgtattttgacgatgaaacgggcctgcattaaaatctgttcagatattatgtaccggagtgtggctggttcgtcagtcaggatccaatagggctgaaagggggatggaaccgatatcattctccgctgaatcctattacagatagtgatcctcttggccttattacttgtggtgctgatagaggtgattctggcaagttattaagatgaaaaatggttgaaaataattgcgttagtgaatgctcatttatgcctttacctacaaaaagtaacggatttgcttgctggaattgtgttaacgaatgcaaataaaatcaatgctgttgatgtttttactacaggaataagtatggttaacgataaggatacagctatattaattagtgatttaatgttgagattcggtaaggagcttgatgaatctgttgctgttgttcagtcccgttgtgatgaggatgaatttaatgtatatcgagaaacggttggttttatcatgggtgaaatgcttattaaaataatgaatccattatatgaaaaacatccagaaataaaaccaaaaggattgaaacaaaacatctggaaccggatgaataatgtgtaaaagccggaggggttatcttttcccggctttttattatcaattactcattaactcctgttccgttcttttgcgtttaatcaccggaatatctccggtattgttcagcgccccggaaatgtttttaaccactgttctgcactccgtttattaatgcgggttacgcccatcccttcaatacagccaaagagtccgtgggtatgctgcggcgtgatcacgatgcaatccctcattacccgcaccttgacgggcatcccgttaataaaccccgcctgcggcatccattcaccgtacaaacgaactgaaagtctctcaacgcgtgagtatgtaagtatcccgcataatcgagccattcacatttagagatcatccgacataatcaatctgccaacgcaggagatcgctatgcgtaaagcccgtattactgcgcaccagatcatcgctgtgattagatcagtcgaatccggacggactgttaaagatgtctaccgggaggccggtatttctgaagccaccagggacaactggaggtctggatacggcggcagggatacgcgtggaatcacaaaaggctccaccgtatttactgtctgctcaagctgaattttcgccgtaagggtaaacaacggctgccggtacgcaatccctcgccactggtcacgccggaagcgctgaaccagagctggtctgtgggcgtcgttttcgcacgttcaatgttgttgatgactgtaatcgtgaagcgttgtcgattgaaatcgatctgaatctgccagctctgcgagtggtccgtgtactcgacaggattacagcaaccgcggttatctggccatgctgcgtatggataagggaccggaatttatctcgctggcactggctgaatgggcaaagaaacatgcagtaaagctggcgtttatccagccgggtaagccgaagaaaaacgttttcatcacgcgctttaaccggacataccgtacagaaatactcaattcttatctgttcagaacgctgaatgaggtgtgggaaattacggataaagggttatcagaatataactgcgaacgtccacatgaatcgcggaacaatatgataccgaaggaataccgccaataacgttatctggccggaatcttaaaaatgcatggaactaaaacgggtctatttacaggggcacctgcgatgaatttcgctgcactgaaaagcgataccggatgagagctgcttcaaattaatgtgccatgttcacggggaggttgtgcgacgtttgcataatccagcaagaactgaaaggaaggggagagctttttcatgcctgtataatcagtctggcctgtgtcagtcagctcttagtgttgagactctcgttggagcgttataattgcttttctgtttcggaaaacaagattttccattaaagatcttccctgcgaggaaaagttaactaataatcttaccgtcgagttaggagatgtatgtttaaatataaacaatgttgcaacgatgcctgataattatcctctcttcgaagataagtttcccacacccagtgtagtaggtgtcatggtaatgttatcacttgaatgtaaatggaaggtataattgctttttgactggcattctattccaccctgacaacacgatgttaacatcaacactgtttatattggcaataacgcaatttttttcagattaagaggtgctctgatatatagatttttatgacattacttatttgaattggtaacaaataccaataagtacaagctgttattaccagccacggattttttacatacggtaagatttggtatggcgttatgtattctggatgtgctggattattttaatttggtttaaaaaaggtggttattcaaatgaaaagcataaaaaaattgattatcgcaagtgcgttgagcatgatggctgctagttgttatgctggctcatttttgccgaactcagagcaacaaaaatcagtggatattgtgttttcctctccccaagatttaaccgtatcgcttattccagtgtcgggcttaaaggctgggaaaaatgctcctagcgcgaaaattgcgaagcttgtagttaattctactactcttaaagaattcggggtcagggggatttctaacaacgtggtagacagtactggcactgcatggcgtgtagctggtaaaaatactggtaaagagatcggtgtgggcttatcaagtgacagtcttagaagatctgatagcacggaaaaatggaatggggtgaactggatgacctttaatagcaatgacacacttgatattgtcctgacaggaccggcgcagaatgtcacagctgacacgtacccaataactttagacgtagtgggatatcaaccttaatagtaaacaactattagtgtattgtgccttgtttaaggcgcaatacacatcaaatcatctatttttcttttacaatttttgatatgaaaatagttaattttgctgtaatggcggtagctttgttcgccactaattctatggtttcagtatatgccgtcaaccagcaattaaattcagccactaaattattcagcgtgaagctgggggctacacgagtgatttatcacgctggtacggctggagcgacgctctcggtgagcaacccgcagaattaccctattttggttcagtcttcagtcaaagcagcagacaaaagttcgcctgctccctttttggtgatgccgcctctatttcgtttagaagcaaaccagcagagtcaactgcgtattgtccgtactggtggtgacatgccaacggatcgtgagactttacagtgggtctgtataaaggcggtaccacccgaaaatgaaccgtcggatacacaggctaagggcgcgacccttgacctcaatttgtccatcaacgcctgtgataagctgattttccgcccggatgccgtgaaggggacgccggaagatgttgcaggaaatttaagatgggtggagacgggcaacaaacttaaggtggagaaccccaccccgttttacatgaatttagcctctgtcacagtagggggaaagcccattacagggcttgagtatgtccccccctttgctgacaaaacactaaatatgccaggtagtgcccatggtgatatcgagtggagagttattacagactttggtggtgaaagtcatccgttccactacgttcttaaataaatccaggggcttagcggcagaaaatgaagttcaaacaacctgccttgctactgttcatcgcgggagtggttcattgcgcaaatgcgcacacttacacattcgatgcatcaatgttgggcgatgcagcgaaaggggttgatatgtcgctctttaaccagggggtacaacagccagggacttatcgcgtggacgtgatggtgaatggtaaacgtgtcgacacccgtgatgtggtgttcaaattggaaaaggatgggcaaggaacgcctgttctggctccttgtttgacggtcagtcagctttcacgctacggcgtaaaaacggaagattaccctcagttgtggaaagcagcaaagcccccagatgagtgtgcggatctgaccgccattccacaggctaaagcggtactggatatcaataatcagcaactgcaactgagtattccgcagttggcgttgcgtccggaatttaaggggatcgctccagaagatctttgggatgatggtattccggcgtttctgatgaactacagtgcgaggacaacgcagacggattacaaaatggatatggtggggcgtgacaactcttcctgggtacaactgcaaccgggaatcaatataggtgcgtggcgtgtccgcaatgcgaccagctggcagcggagtagtcaactgtcggggaagtggcaggcagcatatacctatgctgagcgtggactgtactcactaaaaagtcgtctgactctggggcaaaagacttcgcagggggagatatttgatagtgtgccatttaccggtgtgatgttggcatcggatgacaacatggtgccctacagtgagcggcagtttgctccggtagtgcgtgggattgcccgcacgcaggctcgggtggaggtcaaacagaatggttacaccatttacaacaccactgtggcgcccggaccgtttgcactgcgggatctgtcggtaacagacagtagtggtgatctgcatgtcaccgtgtgggaggccgatggcagtacacaaatgtttgtggtgccgtatcagaccccggcgatagcactgcaccagggatatttgaagtacagcctgttggcgggccgataccgatcgtcagactctgcaacggataaggcgcagatcgcgcaggctacgttgatgtatggtctgccgtggaatctcactgcatacggcggtatacagagtgcaacgcactatcaagctgcattgcttggtttggggggatctctcgggcggtgggggagtttatctgtcgatggaagcgacacacacagtcagcgtcagggggaggcggtacagcaaggagcctcctggcgactgcgttacagcaaccagctgactgcgacggggacaaatttttttctgacgagatggcagtatgcctcgcagggctataacaccctatccgatgtgctcgacagttatcgacataatggcaaccgtctatggtcgtggcgggaaaatttgcagccgagctcgcgtactaccctgatgttgagtcagtcatgggggaggcatttgggcaatctgagtttaaccggttcccgtaccgactggcgtaatcgccccggtcatgatgacagctacggactgagttggggaacctctatcggagggggctcgctgtcattgaactggaatcaaaacagaacgctgtggcgcaatggcgcgcaccgtaaagagaacataaccagcctgtggttcagtatgccattaagccgctggacggggaataatgtaagtgctagttggcagatgacttcaccatcacacggtggtcagacgcaacaagtgggggtcaacggagaggcattcagtcagcaactggattgggaggtgcgtcagagttaccgtgccgatgccccgccaggtggtggtaataacagcgcattgcacttggcatggaatggggattacggcctgttaggtggtgactatagctacagccgggcgatgcgccagatgggagtcaatatcgcgggaggtatagttatccaccatcatggtgtgacgctggggcaacctttgcaaggctcagtggcgctggttgaagcgccaggggcctcgggggtgccagttggcggctggcctggcgttaagacggattttcgtggcgacaccacagtgggcaacctgaacgtctatcaggagaatacagtcagcctcgatccgtcgcgactaccggatgacgcagaggtcacacaaaccgatgtgcgcgtggtgccaaccgaaggggcggtggtggaagcgaagtttcacactcgcatcggggccagggcactgatgacgctgaaacgggaagatggtagcgccattcctttcggggcgcaggttacagtcaatgggcaggatggcagtgctgctctggtggatactgatagccaggtttatctcactggtttggcggataagggcgaactgacggtgaaatggggagcacagcaatgtcgggttaactaccgcctacctgcccacaagggaatcgcgggcttgtatcaaatgagcggtctctgcagatagccgattctgaaggagagaataatgtggatgaaaatacagcgagtgaaaacggttatctatagcgtaagcttactggtcgctgccagtagcttggtgccgatagcgaacgccgcagaaaaacttcagacaacgctacgtgtaggtacttactttcgggctgggcacgtgccagatgggatggtgcttgcgcaaggctgggtgacttatcacggcagtcacagcgggtttcgggtatggagcgatgagcaaaaggcgggtaacacgcctaccgtattgctgctgagcgggcaacaggatcctcgccatcacattcaggttcgcctggagggcgaggggtggcaaccagatacggtgagtggtcgtggcgccattttaagaaccgctgcagataacgccagtttcagtgtggtcgttgatggcaatcaggaagtgcctgcggacacctggacgctggattttaaggcctgtgcattggcgcaggaggatacgtagccgtctgttccactcatacttcctgtatcagtgaataaggcgaatactgtatatcaggttcgaggatgtattgaaaatttactcaaggcaaatatggttagcaatcttcattgcagaaaaatcaattgctgattgattttaaaatctgaaattcatcttttttgtagggagaggaatattatgtttcgtaaaataatttaacggacactgatgcctttattatttctgttttgtggatttgtttgattcactcttttgtgagcggggctttataagcccctggtataaggtttgtttatctgtcaggtattcatatgtgatatttaagattttatgtttagggggctttttcttgtcccctcaggcgtaaaaataatttattttttacataaaggaataaagcatatgtcttatgcacgacatttaccggtattaatgtatcaccatgtcagtgataaacccggacagataaccttatctccccgtacgttccgggcgcagatgaaatggctggccgaatctggctggaaaaccgttactgctgcagaggtggaagctttttatcatggtgcaagattgcctcgtaaaagcgtcatgctgacctttgatggcggctggctggataactggttgcaggtttttccggtgctgcaggagtttaatctgcatgcgcatctctttcttgtgaccagtttgatcagtgacggaccggtccgtattcctgcaggcgaaccggtgtactctcatgatgagtgtcaaatgctggttaaacaaggccgggctgatgaggtcatgctgcgctggtcagaggtccgggagatgcacctcagtggccttgttgagtttcactcgcacacgcacacccaccgacgctgggaccagaagcctgtgtcccgtaatccgtcggatttgcttcgtgtcgatattcttcttagtcgtaagcggatgagggagatgctgggttattgcagtcagcatctgtgctggcctgagggctggtattgttctgactatattcatgtggctgaagagttggggttcacatacctgtataccacagaaaggcgtatgaacaatccagtcatcggttcacagcgtattggtcgtatcaacgcaaaggagcgaaagaatgtgggctggctgaaacgtcgtctgttttatcacaccacgcccggattttcttcgctgctggcccggcataagggggcacgtcggatagctgactgagccagagaccaggatgaaagtgctgcataccgaatcctcccccatcatcggcgggcaggggttgtaggctatatcccaaatgatggtgctgattttgagcagaaataagataacaccggaggccgtgatagacccggttgcgcagaatctggaggcagcaggtcactggcgcagggcttctacccgctggcttttggttatgggagattttgaatgtacagaggcccagcgggagtggttgttgttgcgccggaattattgccttgcgcagatatcttcccctggcgccagtaaagctggatatcagcgacgtgacgaaatgagaggagcctgcacataggtttgtgttttgagtaagtgtcttatttaaaccgtctgttctgtttcctccgctttcacaaataatgtcgagccgggtgggggactcaagtaagaataatctggcgatgttttgcttgtttccacgggatactttgttaggtgaacgatacaattaatgcgctccagactgcgtcacagaaaaggagaatgcctttgcagaacgggcgcatgacaatgaaccactttattattggtatctggttcggcgacaaccttgacgatcacgtctgagatagggtatttacactgagtggtaaacaggttcaattagtaaccggagatggatgcaaaatcatgatcgattcagatgctattttgcagccaatagattttttattaagatgatatcaaggacattgaggcacacaatgacgtatcagtaagtcgttgatagctcatttgatataagaatttcttttatcaacggaagataatgatggaactgatcaataatcgtggtatgcgagactggatgatatttattaaagtggcggaagtagggaatctttcccgggctgcgcgggaattagatattagcatttctgctgtcagtaaatcgcttagtcgccttgagaattctattgaggttactttacttcggcgcgattcacatcacttagaactgactggagctggtcagacagcctatgcaagcatgaaaaggataacatcttcctttcagtccttgctggatgaattgcgaaatccggataaaattatcagagggagtataaaattttcggctccggctattgtctgtgagtttcttgccaataagtggatatgggaatttacagctagctatccggatacaaaaatctacctggattcacgagagcgtagcgatttttttagtaaatccctggagtttgatgagctggtttttaaaagtggcataatcgaaagtgaggatctcgtgtatcgaaagataagccctttaaagttggttctttgtgcgagtccgaaatatatcagaaaatatggcaggatctcacaccctggcgatttggaaaatcacattattgtgggtcttcacaaccatggtctttccggacctcttactcttttccgtcaggatgaatcatacactattagtggcgctgttaatgttcatttatcttccaataatcttttgagtgttcttaatttggttttagaaggaaagggtatcaacctcatgactccggcctggcttgccaccaaatacttaaaaaataatgaacttgaaattatacttcctgaatggagggttccagatctccccatttatcttgtatggcgtcatcgtcagtattattctcctttatttcaacgctttctgtcttttattgaagataaatggaataatcgcccacaaattgattttctgaatgatgattaacccgtttggaatggttttgatacgttcctgacttaaacccacatgatgactgaattgaggcatcgagatatgcgactggtcagccagtcgtcttttgacgatgcccaatacaaaacatgatgccgactgacggaaatgataatacccggaaacaggacggggctgtttttgggcagccggaagttaagcccataccagaaacgttgcagtgtactgaaaaatggcgccaggttgcacctgttcaaagattttctgaaggcgcaggagtattcattactgatatcctccattgcgccttcgggaacccacaggaccagctattttaccgatagtgtttaaaaggcgtaagtaatgccgagcatgaagtcattggaggcagcctttgtgtctgcatcataagcggtatgttcatcaccagcatagtgattttttgaaatgcttactttgccagcattaatgtatttataactggcgtcaatcataatattatctgttacagcatattttgcaccgatacctgcgccccaggcaaagttattttttgaagcagacagagtttcattaataccaaaaccaacaggaatggtgttattacttagcttcacatgagcgaggccaacgcctgcgctgatatagggagtaaatgccgtactattgtgaaaatcataatagccattaaccatgtaagtggtcattcggacctgattttttacatttatgtgtactggatcaccaaatgcaataatatcctgcccgcctttagcatccgtctcacctctgaaagtggtatccagttctaaacgtactggaagctggaatggatcataaaagtcataaccgatagcaaccccgccgccaaaaacgcctttggtacggtcaggtaacgttgcatgaccattaactatctcatcctggctgaaggttgagttgattccatagacattgactacggatgtccccgctttcccggtgatatagatcccttcttttgctgatgcagtagcggaccaggctaccacaaggggaatgatgcagactgcgaaaaagtttttcatttcagaacctgccttaatattgggctaaaagacaagtttcacggtatagggtgtgatataacgattacataaacgaagcccaaaaaacggtctattgtaacgctgggttttctgtaagcgggtaaaaaatgagatgaagattttaaataacaatacgataatcgtcggtatggaaatccatctcctcgccaaattgccccacgtacggtttcacttctacgttatgtaacgggtagtgtgagatggagcgatgctgtaagaaaaagatgaagatgaatttgtacccgacctggataaagcccgttatcccggaataacgggcaaaaatatttactcaagtgcctgggcgagatcttgttgtacctgttgacgctgttctggtgttaagactttgcttaaatcaaaataatatttaacccgataatagcgagcctgttgttctatgttactgaaggctgcaagctgctgttttacggcggcgtcatcccatttaccggatttaatcacctctatcagcgcaccgtctttaattcccttcatagaaatctgactgacgtcggtttccagttgttggtgaagttttttgatccgggtaatctgatcgtttgtcagcttcagatgctggacaataggatcctgggcgggcaggggaggattggggacagcggtggcgaaagcgccaaaagaaacgcccgccagagtcgctgccagtaaagttgtgcgtacaaagtttttcatgaagatatcctgataagggagtgattaaccgtttttattacccacgaatggcgagcaattatcttagagcctatcccagtagggctattttacttgccattttggacctgggcagtgctcgccaaaacgcgttagcgttttgaacgccgctagcggcggcccgaagggcgagcgtagcgagtcaaacctcacgtactacgtgtacgctccggtttttgcgcgctgtccgtgtccaaactggctgcgccaataacgcctggtgggataggctcttagtcagaatacgttgcctgccacattacgccacgcgaatttgttttacggagagttacggagtgaaacaatcccgccgcggtgagcggcaggttgcttacaaggtgaatggatcggcatcgcgccaggctggaaatttttcgcgatagtcctgcaaggcgacgagagaaagatcggcatcgatacgtgtcgcctggtgtggttcggcggtggcgataatgtcgccctggggattaatgatccggctatcgccgcgataatgtagcccgttaccatcggtgccaacccggttgcagcctgcgacataagcctgattttcaatagcgcgcgccgtcagtaatgtttgccagtgtagcgagcgcggcgcaggccagttcgctacatacagcgccagatcgtaatcattgcggttgcgcgaccatatcggaaagcgcagatcgtaacagatcagcggcagaatgcgccaaccgcgccactgcacgatgatgcgtttatcgcctgcggcataatgttgatgttcatccgccatacgaaacagatggcgcttatcatagagatgaaccttgccttccggttcaaccagtaagaagcgatttacggcgccgcgctcagtttgtagcgccgcgctgccggcaatcagagcgtcagtttgtcgggctttggcctgcatccacgtaatcacgctatcttgcgaaagtgagttattagcggcctccatcgcgaagccggtggtaaacatttcaggcagaacaatcacatcccggccagatacgagctctagctgtctgtcaaaatgacgcaggtttgccgggccgtccatccagactaaaggttgttgcaacagagtaattttcaaaccagacacgatcggagctcctcattgaacagcgtctttacactgtagcatgagcaataataaaaaagcggcaagaaaaagccccgcgaaagcggggcaggaaagacacgagactgattatgcggcttcgactttacgcactttctccggcagctttaccggtttggtcgccagcgcttcaggttcaaaatcatcaacgttgatactgcgcaggcggctctcttccgctttcgccaggatggcggcttcatctttatctataagccctttcgccagcgcattgcgcgccagttcatccagacgagtaaacggcagatttttacccagttctttgcagatgcgctggtggatagggtcggcagcgatgacatcacgcagcgcttcttccagtaaaccgaccggattatgttcggcgggcgtcagatactgaccgcgcccaatgcgtgaacgtgtggcgttcggcacctgtaggatcttcgccacggcgtgatccagcttatcagacggcgccagataatgacggccagtcgggaagatcatcgcggtgagcaatccggccacgacgcggttcgggaagttctgcagcagatcgtccatcgcttgttcagcacgatacagcgcatcctgtacgccccagtgcaccagcggcaggtcggcttcgtggcgaccttcgtcgtcgtaacgcttcagtacggctgaggccagataaagctgactcaacacatcgcccagacgcgcggagatacgctcgcggcgtttcaggctgccgcccagtaccgccattgacacgtcagacagcagcgccaggtttgcgctcagtcggttcagatgctggtaataacgcttcgtggcgtcgccggttggcgtatggctcgttaatccgcgggtcaggccaagccagaaactgcggacggtattgctgccgacatggccgatatgtttaaacaacagcttatcaaaggcattcacatcattattctgcgctgcggccatctcttccagtacataaggatggcagcgaatggcgccctgaccaaagatcatcatgctacgggtcaggatattcgcgccttccacggtgatcgcgataggcgcgccctggtaagcacgcgccaggaagttgctctcgcccagcataatgcctttacccccagtgatatccatcgcgtcgataatggactgctggccacggtgggtgcagtggtacttcacgatagccgacagtaccgccggtttttcacccagcataatgccataggtgattaacgatgcggcggcatccatcacataagcgttacctgcaatacgcgccagcggttcctcaataccttccatcttgccgatagatattttgaactgacgacgaatgtgagcataggcgccggttgccagcgcgacggatttcaccccgccagtggagttggacggcagggtaataccgcgtcctaccgacaaacattccaccagcatacgccagccttgtccggccattttggggccgccgataatataatcaataggcacgaaaatatcgttaccgcgggttggaccattctggaacggaacgttaagcgggaagtgacgacgaccaatttccacacccggcgttgaggtggggatcagggcacaggtaatacccagctcttcttctccgcctaacaatctatccggatcggaaagcttaaacgccaggcccaacacggtagctatcggtgccagcgtaatgtaacgcttgttccaggtcaggcgcatacccagcacctgctggccctgccattcgcccatgcaaaccacgccggtatccggaatggcgcctgcatcagaacctgcttccgggctggtcagcgcaaagcaggggatctcctggccgcgcgccagtcgcggcagatagtgattcttctgctcttccgtaccatagtgctgcaacaactcgccagggccgagtgagtttggaacgccgacggtgatagccagaatcccggagacgccggacagtttttgcagtacacgggactgcgcataagcggagaactccagtccgccgtactcttttttaatgatcatcgcaaaaaaacgatgctctttcagataagcccacagttccggcggcagatccgccagttcatgggtaatctggaaatcgttcgccatccggcacgcttcttctaccggaccgtcgagaaacgcttgctcttcggcagtgagttgcggttgcggatagttgtgcagttttttccagtcaggcttgccctggaacagatcgccttcccaccaggttgtaccggcatcaatcgcttctttctcagtgcgcgacatcggcggcatgaccttacggaagccgcggaacaccggtgcggaaatcattgattttcgcatcggtgtgaggttaaacggcacgaggataatggccagaggaaccaacagccagatggaccacaggccagcgacgccaagtgcggcggtccaggcgagcagaatcaggctgctgagaaataaactcacgcggtgatagaacaatgcgccgagcagaacaaccgtagcgataatactcaaaatcatcataacgaaaagctcccttgcttgtaggaggtctgaccacttgtgatgattaggttgtagtggatgtaaaattttttagcaatgtgtttacaaaataattacaacaaagctcacattgttgccgtttttgggggcacgaaaaatcaaaagcgtgaggcgttaattcggcttatgcttctcgcctgtactgctatccggtacactgcatactgtcatttacattcatgctgaaggatatcctcatgtaccaggatcttattcgtaacgaactgaacgaagcggcggaaacgctggctaattttttaaaagatgacgccaatattcacgccattcagcgcgcggcggtcctgttggctgacagttttaaagcgggtggtaaggtactttcctgcggtaacggcggctcccattgcgatgcgatgcactttgctgaagagctgacaggtcgttatcgtgaaaatcgtccgggctacccggcaattgcgatttctgatgttagccatatatcctgcgtcagtaatgattttggctatgactatattttctctcgttacgttgaggcggtagggcgcgaaggcgatgtcctgttagggatctcgacgtcgggtaactctggtaacgtgattaaagcgattgccgcggcccgtgaaaaaggcatgaaagtgattacgttgaccggcaaagacggcggcaaaatggcgggaacggcggatattgaaattcgcgtaccgcacttcggttatgccgatcgtattcaggaaattcatatcaaagtaattcatattttgattcagttgatcgaaaaagagatggttaaataactatacccgtcatacttcaagctgcaggtgcgttggttgcgctcagaaaccccagtcacagagttatctatgttcctggggatttcctcccttaccgccttcctgcaactcgaattatttagggtatagcatattgttttcttggatattttgagatttgattggctgtaaaaattacgccttcccgcttaaggcgtttgtggaggtgatatatgtgcgaactgcttgggatgagcgccaatgtgccgacggatatctgctttagcttcaccggactggtgcagcgtggcggcggaaccgggccgcataaagacggctggggaattaccttttacgaaggaaagggctgtcgcacgtttaaagatccgcaaccgagctaccattcgccgattgcgaaactggtacagaattacccgatcaagtcctgctcggttatcgcccatatccgtcaggctaatcgcggtgaagtggcgctggaaaatacacacccttttacccgggaattatggggacgcaactggacttatgctcataacggtcagctcaacggttataagtcgctggaaaccggtaattttcgtccggtgggggaaaccgacagcgaaaaagcgttttgctggctattgcataaattaacgcagcgttatccccgcacgccgggcaacatgacggcggtatttaaatatattgcgacactggcgacggtattacgtgaaaaaggcgtttttaacatgctgctgtcagatgggcgatatgtgatggcgttttgctcaacccatttgcactggatcactcgccgggcgccgtttggcgtagccacgctggtggatcaggatatggaaattgatttcagttcacagaccacgccaaatgacgtggttaccgtgattgctacccagccgctaacggggaatgaaacctggcaaaagattatgccaggcgaatgggcgttattttgcctcggagagcgtataatttgaggccagctgtggctgaacgacttcgtgactcaacggtttgctcacgacgtaacgtccatcaacgatagaaacagtcggcggcttatgcgtctgttcaaaataatcgtagccgggttttagctgcgcccagaaatctttgtaatatgaatatttatgacgctgcatattggcgtcggtcatccggaacggataaatactcacctgcacgctcggctgaccaaagaccagcgcggcggtgacaaactggaaaatctcatcaatgccgctgtcggtcatggcatagcagccgacggaaacacaggcgccgtgaatcatcagatatttaccatcatagccatgcgcgcgatcgtaggcattgggaaaaccaatgttgatggccttataaaaacggctgtctggtttgagttgattacgctgaacgctgtaaaacccttccggacttttaaaatcgccctgacggcgtttcgggcctaacccgccggaatagttgcaaattttgtagctatcaagcaactggtattgctcacccattttgacgtagagatcaagggtgcgctcttctttaaaaatctgaatatagaccggtgagcccattaactgctgcttatactctttactgaccggcgtgacggggctgctgctgctcagcaaaccggcaaatgagacgcacggcatcagaagcatcgcaagaaaaaatgcgattttacgcatactgcttgttccttgataaaacggttacacacgccagaacggcaaaagagtccccaaatcggagtaatctggatttggagcgctcacattagcaccacggcagtttttcgcaagtccccgtgtgtacgtttacaattttcccgccgctttcgtcgtcataccttcgaatatgtcgcatttttaacgcgaatgtctctttgcgcgcaataaaacatactgtacacttaaacagtattgtgggggcgagcgatgcgcaaaatcatacatgttgatatggactgtttttttgccgcggtagagatgcgtgataatccggcgttacgcgatatccccattgccattggcgggagtcgtgagcgaagaggcgttatcagtaccgccaactatcctgcgcgccagtttggcgtacgtagcgcgatgccgaccgccatggcgctaaagctgtgcccccatctcaccttactgcctggccgctttgacgcctataaagaggcttcgcggcatgtacgtgacatcttttcccgctacacttcactgattgaaccgctctcgctggatgaagcctggctggatgtgactgacagcccgcactgttatggttcggcaactctgatcgccagggagattcgtcagactattttcaatgaactgcaactcaccgcctccgccggcgttgcgccagtgaaatttctggcgaagatcgcctccgatctcaataaaccgaacggacaatatgttattacgccagccgatgtacccgactttcttaaaacgttgccgttagccaaaattccaggcgtggggaaagtttccgccgccaaactggaaaatatggggttaagaacctgcggggatattcaacagtgcgatctggcgatgcttctcaaacgctttggtaaatttggccgggtattatgggagcgtagtcagggtattgacgagcgtgatgttaacagcgaaaggctgcgtaaatcggtaggtgttgagcgtactctggcggaggatattcatgaatggtcggactgcgaggccattattgaacatttatatccggaactggagcgtcgtctggctatagtaaagcccgatttactgattgcccgacagggcgttaaattaaaatttaatgattttcagcaaaccactcaggaacatgtctggccgcaattaaataaagaagacttaattaccaccgcccgtaaaacctgggacgagcgtcgcggcgagcgcggcgtacggctggtggggctacacgtaacgctgctcgaccctcaactggaacgacagttggtgttagggttataagtcaggccattaatattttatcactattacgattgcgccatctaaatttcagtattactatacccgcgttttctcattctcaataactgcaaaggaggttcatcatgacactttattctctgaacgcactttgcagacctttccaggattaattttcttttattgccctggattagtctgccatttcctgattttttaattcatatatggaatggtatatgggcaattatattcgtcctttatcagatgtggtattttctatcgcatcagataacctgtggatcgaagattccgcgatccaacaattatatacgacggctaagttaaccggtatgaaacgcgttatcgggatgccagatctgcatccggggcgtggctatcctattggcgcagcctttttctcgcgtggacgcttttatccggcgctggtcggcaacgatatcggctgcggcatggcgttatggcaaacggatattttagggcgtaaatataacgccgataaactggagaagcggctggcgtcgctgactgacgtggcggacgcgcagtggctggaggagaatgtccccgccgcaatgcagcatcattcgtggcgctctgcgctgggttccattggcggcggcaatcattttgccgagctgcagcaggtcgatcgcatcgtcgatgctgattcgttcgctttgtcggggttgcaaaaagcgcagttattactgctggtacacagtggttcacgcggtctggggcaagctatcctgcgtcgtcatgtggaggcgttttcgcataacggtttgccggaagatagcgacgatgcgcgccgctaccttgcagaacatgacgatgcgctggcatttgcccgcagtaatcgcgcgctgattgcccgccggatactgcaacagctcagggctgagggcgaaccgcggctggatgtggcgcataacttcgttgaaccctgtactgtcgcgggtgaggcggggtggctgcaccgtaaaggcgctacgccagatgggcagggactggtgattatccccggctcgcgcggcgattatagctggctggtgaaacccgtcgtcagcgaggagagcctcttctccctggcgcatggcgcaaatggatgcgtaccgagtgtaaagaccggttatcggcaaaatttaccccgcgacagctctgccgtaccgggatgggtagccgggtgatttgccgcgatcgccagctcatttatgaagaagcgccgcaggcgtataaatccatcgatagcgttgtggattgtctggcagacgccggactgattacgccagttgcctgcctgcgtccggtgctgacgctgaaaacctcaggggagaaaagcgcatgatcttactgcaactttcttctgcgcagggaccggacgagtgttgtctggcggtaaaaaaagcgctggattgtctgacgaaagaagctgccagagaaaaggtatcgctgacgcgacttgaaacagagccgggacgattaccagacacgctgcgttccgcgctggtctcgctggacggcgaaaaagctatggctttcagtgaacgttggtgcggcacgttactgtggatttgtaccagcccgtatcgtccgcaccatgggcgaaaaaactggtacgtcggcattgggcgcttttccgccgacgagcacatacagtctgatgagattcgtttcgagactttgcgctcttccggcccgggtgggcagcacgttaataaaaccgactcggcagtgcgggccacgcacctggcgagcgggattagcgtgaaggttcagtcggagcgcagtcaacatgcgaataagcgtctggcccggctgctgattgcctggcggctggaacagcaacggcaaaatgagtgtgcggcattgaagtctgaaaggcgtctgttccatcatcagattgagcgcggcaatccgctgcggatatttaaaggaatggcgtttacgccacaataattcggtgttactggcgctgttatagggctgtctggctattcgcgtgtagccgcagcgctatttcagcgcatccaggagagcttatctggcaatggatacccgatattccatattgatagcccgtccagaaatgggacgggcattttagcgctttcttacttcgcaggaatcgctttcagcaattcggtcagcagagtccagtagtggccgacgctttcgatatgtacctgctcatccggagagtgaggtccggtaatggtaggcccaatagaaaccatgtccatatccggatagggtttcttaaacagaccgcattccaggccggcgtggataatctggatgttcggtgtcttgttgaacagacgctgataggtttcccgcaccaggtgcatcaccggcgagttcgcatcgggctgccagccaggatagctgccttttgcttcggttttcgcgccagccagcttgcccagcgaatccagcatactcaccacataatctttaccgctgtcgataagagagcgaatcaggcagtgaatttcgacattcgcatcggacattgtgaccacgccaacgttcagcgatgtttccactacgcctttcgccacgtctgaattgcggatcacgccgttcggcgttgcgttcagcaggcgcacaaaggtatcgcgtgacggcgcggtcaatgcggctttatcactggcaacctcattgagttgcagcgtcaggtttttctctttttccgccagttcgtttttcagaatatcctggtaagcgttcactaatgttttcagcgcgcctacgttgtctgcggcaacggcgagggtagcgaacgcttcgcgcggaatcgcgttacgcagcgtgccgccgttgaaatcgatcagacgcagatccagttcttctgcgtgcccggccagaaaacgcgccagcaatttgttggcattgccaagaccgaggtgaatttcaccaccggagtggccgcctttcaggcctttcagggttagcttaaagcacgcaaatcctgcgggtacagcttcacgggtcaacggcagattagaggtaaaatcaataccgcctgcgcagcccatatagatctcaccttcttcttcagagtcggtgttgatcaggatgtcggcctgcaaccagccggactggaggccgaacgcgccatccatgcccgcttcttcggtcatggtcagcagcacttccagcgggccatggacgacattatcatcagccagtaccgctaacgcagaagccattccaataccattgtcggcgccgagcgtagtaccgcgcgctttaacccattcgccatcaatataaggctggataggatctgtagtgaagtcgtgaacggtgtcgctatttttttgcggcaccatatccagatgcgcctgtaaaacgaccggcttgcgattttccatacctgcagtggcgggcttacggatcagaatattaccgacctggtcgcgatccacgtaaaggcctttctctttggcccaactcacaatatgttccgcgagttgctcttcgtgataggacgggtgaggaatagaacagattttggcaaaaatatcccacaaaggttgtggtgataactgagacagttcagacacgataagtctccttggcggtggtctgaaaaacgttcttacaggccacagggttagcggaattgataactcttacgagatgcgactgagaataccactttctccgcctgcgggtagtataaagcatacaaaaagaggcgtggattccgctaaacactggtttttagcgcgtcaggtctctataatctcgcgcaactatttccccctcgaacactttttaagccgtagataaacaggctgggacacttcacatgagcgaaaaatacgtcgtcacctgggacatgttgcagattcacgcacgcaaactggcgagccgcctcatgccttcagaacaatggaaaggcattattgccgtaagtcgtggcggccttgtaccgggcgcactactggcgcgtgaattgggcattcgtcatgtcgataccgtatgcatctccagctacgatcacgataaccagcgcgaactgaaagtgctgaaacgtgcagaaggcgacggcgaaggctttatcgtcatcgacgatctggtcgataccggcggcaccgccgtcgcgattcgcgaaatgtaccctaaagcgcatttcgtcacgattttcgctaaaccggcgggccgtccgctggttgatgattatgttattgatattcctcagaacacctggattgagcagccctgggatatgggtgtggtatttgtaccgccgatttcaggtcgttaatcagcagcttttcagagcgcccggcaatgccgggcgctgttttattggttacaataagcctctatgagtatccaaggaggctgcacgaatgacacaggctaacctcagcgaaaccctgttcaaaccccgctttaaacatactgaaacgtctacccttgtccgtcggttcaatcgtgggtcgcagccgcccatgcaatccgcgctggacggtaagaacgtcccgcactggtatcgcatgataaaccgcctgatgtggatttggcgcggcgttgacccacgagaaatccttgatgtgcaggcgcgcattgtgatgagcgacgcagagcgaacggatgatgatttatacgatacggtcatcggttaccgcggcggcaactggatttatgagtgggcaaagcaggcgatggactggcagcagaaagcctgtcaggaacaggacgccatgcgcagcggacgctactggcttcatgcctcaacgctctataacattgccgcctacccgcatttgaagggcgatgagctggcggagcaggcgcaggcgttggcgaatcgcgcctatgaagaggccgcgcagcggttgccaggctcgttacgtgaaatggaatttgccgttcctggcggttcgcctgtcaccgcgtttttacatatgccgaaaggggatggcccgtttccgacggtgctcatgtgcggcggcctggacgccatgcaaaccgactattacaccctgtatgaacgctatttcgcgccgcgcggtatcgcgatgttaacgcttgatatgccttcggttggattttcatcaaagtggaaattaacccaggattccagcttgctccatcagcatgtgttaaaagcgcttcctaatgtcccctgggtggatcatacccgtgttgcggcgtttggtttccgttttggcgccaacgttgcggtgcgtctggcctatctggaagcgccgcgtttgaaagcggtggcttgcctggggccggtggtccatgcgctacttagcgatccgcaacgacagagcacggtgccggagatgtatctggatgtgctggccagccgtctgggtatgcatgatgcttcggatgaggcgctgcgtgtggagctcaatcgctattcgttgaaagtacaggggctactgggcagacgttgtcctacgccaatgctttccggcttctggaaaaacgatcccttcagcccggaagaagagtctcgcttaattacaacatcatcttcagacggtaagctgatagagatcccttttaacccggtgtaccgcaattttgaccgcgcgctgcaagaaattaccgactggattaatcatagattgtgttaatagattgataaattctattgatttggtaaaacagttgcttcattaaaggagatcgcaatgacgttaccgagtggacacccgaaaagtagattgatcaagaaatttaccgcgcttggcccctatatccgggaagggcagtgcgaagacaatcgtttttttttcgattgcctggcagtttgcgtcaacgtgaagcccgcgccagagaagcgtgaattttggggctggtggatggagctggaagcacaagagaaacgcttcacttatcgttatcagtttggtttgtttgataaagagggcaactggaccgtagtgccgattaacgaaaccgaagtggtggagcgactggaatacacgctacgcgagtttcatgaaaaactacgcgacctgctgatttctatggagctggcgctggagccgtctgacgatttcaacgacgagccggtaaaactgtcggcataaccctgctgccatgcctgatggcgcagcgccatcaggcacaatgcgacttatcagaactggtaggtcaaccctattgccacaatatcatcgtcattaatgcctaacgtgttatcgctatcaagctgattgattttgtaatctacaaacgcggacatatttttgttgaagtaataggttgcgccaacgtcaatgtaattcaccaaatcctcactgccgacgccctcaatatctttgccttttgacagcacatagcctaatgacggacgcagaccaaaatcaaactgatactggataaccgcttcgaagttttgggttttattggcaaatccgccggaaactggcgtcatgttgcgggtttctgaatagaaggtcgcaatataaatatcattagcgtcatacttaacacccgtagcccaggcttcggctttatcgcccgtaccgcggcgctgcagattttgctccctggtgcgatcggagagagtataagcgccgctgacggcaaaatcgctgccgccgaaatcatagctcacggatgtgccgaagccgtcgccgttttgctttttcacatcgcgatcttcgtttttcccctgatactgtaaggtaagatccagtccatcaacgatgccgaagaaatcggtattgcggtaagtcgccagcccgctggcgcgtttagtcataaaattatcggtctgggcggaagagtcgccgccgaattcgggaaacatatccgtccaggcctcaacatcgtacagcgcgcccaggttacgtccatagtcaaaagaaccgatatcttttaatttcaggccagcaaaggccaggcgggttttttgctgggacgaatcactttcggctttattactggcaaactcagcttcccagcgcccgtagccggtcaattgatcgttaatttgcgtttcgcctttaaaaccaaaacgaacgtagctttgatcgccatctttgctgtcataatcgctcatatagtgcatggctttaacttttccatacacatcaagcttattaccgtttttattgtaaacctcggcggcgtgaacagatgctgatgcgatgatactcaccactattgccagagtgcttttattcatttccattcctgttttaattacgcgctatgatttgtcgggaaacccggtaaaaaacaggaaggtttttaacgttcggtaatgaaagatttatgacaaagtgagaatttttttaaaaaaatatgtttaattgttgcggtaataaaatggtcaaattccgccgctacgcttgctgatcctgcgcaacaaaatttcacgctacgcgtacaggttgttggcaaccggagccagtcctgctaaaacgttcatttggtctttatttcttattttgaacggcagagaatcatgagtgacagccagacgctggtcgtaaaactcggcaccagcgtgctaacaggcggatcgcgccgcctgaaccgtgcccatatcgtagaacttgtccgccagtgcgcgcagttacacgccgcgggacatcgtattgttattgttacctctggcgcgattgccgccggacgtgaacatctcggctacccggaactgccggcaacaattgcctctaaacagcttctggcggcggtagggcaaagccgcttgattcaactgtgggagcagttgttttcaatttacggtatccatatcgggcagatgctgttgacgcgtgcggatatggaagacagagagcgctttctgaacgcccgcgatacgctacgtgcattactggataaccatattgtgccggttatcaatgaaaatgatgccgttgcgacagcggaaattaaagtgggcgacaacgataacctctccgcgctggcggcgatcctggcaggcgcggataaactgctgctgctgaccgatcagcaaggattatttaccgccgatccgcgtagcaatccgcaggcggagcttatcaaagatgtgtatggcgttgacgatgcgctgcgctctatcgcgggagacagcgtttccgggctgggaaccggtggtatgagcactaagcttcaggcggcagacgtggcctgtcgcgcgggtattgatacgattattgcctcaggcagtaaaccgggcgtgatcggcgatgtgatggaggggatttccgtcggcacccgttttcatgcgcaagcctcgccgctggaaaaccgcaaacgttggatcttcggcgcgccgccggcaggtgaaattacggttgatgaaggcgcgaccgcggcaatgctggaacgtggcagttcacttctgccaaaaggcatcaaaagcgtgacgggcaatttctcgcggggggaggtcatcagaatttgtaacctgcaagggcgtgatattgctcatggcgtcagccgttataacagtgatgctctgcggcggatagccggtcaccactctcaacaaatcgatgcgattctgggctatgaatatggcccggtcgctgttcatcgtgatgacatgattactcgataaggaacaggcatatgctggaacaaatgggcattgctgctaaagcggcgtcgtataagctggcgctgctctccagcggcgaaaaaaatcgcgtgctggaaaaaatagccgatgaactggaagcgcaaatggaaagtatcctcagcgcgaacgtacaagatgttgagcaggcgcgagccaatggcctgagcgaagcgatgctggaccgcctggcgctgacccctgcgcgtctgaaagcgattgctgacgatgtgcgccaggtctgtaatctcgccgacccggtcgggcaggtgatcgacggcggtctgctggacagcgggctacgtctggagcgccgccgcgtgccgttgggcgtggttggcgttatctatgaggcgcgtccgaatgttaccgttgatgtggcttctttgtgtctgaaaaccggtaatgcggtgattctacgcggtgggaaggagacgtatcgcacgaatgccgcaaccgttcgtgtcattcagaaggcgctgaaagcttgcggtttaccggaggcggcggttcaggcgattgataatccggaccgttcgctggtcaatgaaatgctgcgtatggataagtacatcgatatgctgatcccgcgcggcggcgcaggcttgcataaactgtgccgcgagcaatccaccattccggtgattaccggcgggattggcgtgtgccatatttttgttgatagcagcgcagacatcgccccggcgctgaagattattgttaacgccaaaacccagcgcccgagcacctgtaacacggtggaaaccttgctggtgcatcaggacatcgcagaacgctttttgcctgcgctgagcaagcagatggcggagagcggcgtaacgttgcatggggatgaaaccgtcatgcaggtactgcatggccctgccaaactggtgccgctgaaaccggaagagctggataacgagtttctgtctctggatctgaacgttgtggtggtcgaaaatatggatggcgctatcgcccacattcgcgaacatggtactcagcactccgatgcgattttaacgtgcgatatgcataatgctgcgcgtttcgtgaacgaagtggattccgctgcggtttatgtcaacgcctctacccgttttaccgacggcgggcagtttgggcttggcgcagaagtggcggtcagcacgcagaaattacatgcccgcggtccgatggggcttgaagcgcttaccacctataagtggatcggctttggcgatggtacgattcgtgcgtaattaatgacgagcggtgcaaaaatagccggttgagtagcaaggctattgacgcaccgcccggttagttttaaccttctaccccgtgattcacccgcgtgaacacacccttctcagggccgatatagctcagttggtagagcagcgcattcgtaatgcgaaggtcgtaggttcgactcctattatcggcaccatctaaatcaatcacttatgtacaacctcatttctcaaaaacaccattttttgctctcgggtacactctcgggtacacaactagcaaaacataagcagtatcccacctaacccaaagatgatttcttgtttaccatgcgccatgagttggcctaccatttgataggctgaatacgtattggaaagattctacattccatcatgttaatgattccgtctcagagctatgtactctgatcctacccgcgtaatatgggcacaaccctaagcgaggttctggttttcaaattgttccggactgagaccgccacaggcactgtgacgacgctaccgattgtaatcacactcactataattaaacactgctgtccgcattatttcccggctgacaaagtcctctccgtggatacattccaccttcagcgtatggaagaagctttccgcacaggcattgtcgtaacaacaacctctggcgctcatacttccccgcagattatggcgtttcagtaagctctgataatccgttgaacagtactgaccgcctctgtctgtatgcacgatgacattttccggacatttacgccgccacagcgccatctgtaacgcatcgcaggcaagctgtgctgtcatccgcgaagacatcgaccagccaatgactgaccgcgaccacagatcgataaccacggccagataaagccagccttcaccagtgcgaagatacgtgatgtcacccacccacttctgattcgggccgctggcgtaaaagtcctgcttcagcagattctctgagactggcagaccatgtttgcggtaactgaccggacggaaccggcgcgaggctttcgcccgcagcccctgccgacgcaggctggccgccacggttttcacgttgaactggtaaccctgagcacgaagctcatccgtcaggcgtggcgcaccatagcgttgttttgcgtcactgaatgcttcccggaagacgttatcacagacaaggtggaaccgctgacgccggtttatctgatgacgacgctgatgccagacgtaccgcttacagatgcaggctatcgccagcgagctaagcgcccggttaaataccccagttgaagtcggtggtgtggaagccaacatggctgtggctggcgcgttaacgacgcctggatgcgacgctccgctggcgatcctcgatttaggcgcaggatccaccgatgccgccattatcaataacgatggcgtagtgaaggcggtacaccttgccggggcggggaatatggtcagcctgttgattcaaacggagcttggcttaagcgatccgtttttggcagaggaaatacccgctggccaaagtggagagcctgttcagcattcgccacgagaacggcgcggtggagttttttcgtgaaccgcttagcccgtcagtatttgccaaagtggtgtatctgaaagagggcgagctgatcccggtcgataaccagacctcgctggagaagattcgtctggtgcgccgtcaggccaaagagaaagtctttgtgaccaactgtctgcgcgcgttacgtcaggtctcgcccggcggctcgattcgcgatatcacttttgtggtgctggtaggtggctcatcgctggattttgaaattccgcagatgatcaccgatgcgctggcgcagtacggcgttgtcgccgggcagggtaatatctgtggtactgaaggcccgcgcaatgcggtagcgaccgggctggttttagccggagaagccaaaaaatagtgcagaaaacagccgcgcaagcgtttagctgcggggtaagtcaaagaaaggcgatgttctctttgatatcccggcggagttgggtacatagtatcaaggtgtctctcacgtggttaattttaaggataagagcatgccaacagcaattgagaaagccttggattttattggtggtatgaacacatcggcgtcagtaccccattcaatggatgaaagtaccgctaagggaattttaaagtatttgcatgatttaggcgtgccagtaagcccggaagttgtggtggcacgaggtgagcaggagggatggaatcctgagttcacgaaaaaagtggccggatgggcagaaaaagtcgcctccggtaaccgcatccttatcaaaaacccagagtatttttcgacctatatgcaggagcagctcaaagaactcgtgtgagctgactatcgaataaaacgctaacggacgtttccatctaaggatggcggcgtccagaagggttgccagtgacagttttggactgccgattcatttcttttcgtcaaattaatgtctatatatttattgaataaatatatagttcataacttactacgttgccattaccgcgtcattcttagatgatctacatttcataaaacacttgattccatttcgtctctattaagaaaaataaaatgtgaacgctgtcaattctgtaaacgtaaaagataaatattgtatacacggatgtttgttggcaaacaggcagatggcaatcaggatcttttacggaacattgtgtatgaaaaataatattgaagagacaataggtaagtacttgcctattttaatgatattacctctggcgggtttggcagagttagcttctttatattcaatccaggctttattaccaaagttaagtgaggtttataatatcccattgaatcaggtagggatgattttatctgctgaggtggggtttctggcattagccatgttatttagcggcacgttatctgaccgttttgggcgaaagccaatcattttttattcgttgctggcaggaggtattttaactctattgtgcgcaactgcatcatcatggccgatgctggtggtataccgcgctttgctcggcattgcagtaagtggtattacggcggccgttacagtctatatcagtgaagaagtctctcctgctttggcagggattgttactggatattttatttttggcaattcgctagggagtatgtctggtcgtgtgtttgcaactttgatgatggagcatgtatctatagatacgattttctttatcttcggtggtgttctgattgctatggcactcgcggtgaagttgtttctcccgacatcccgacagtttgttcctacaccttcactacagcttggtgcagtgttgaaaggcgggttggaacattttaagaatatccgcgtatcattatgttttgtcattggatttattcttttcggctcttttacatccatctttaattttctggcgttttacctgcatcgaccgccttatgagctgagctacacctggataggtttgattccagttagcttctcattaactttttttcttgcgccatatgctgcccgtgtcgcgttgaatattgggtcgatgaatgcgctcagtatgctgatcatctgtatgatggtcggtgcatttcttacgctaatcgccccttctctgtgggttttcatttcaggtatcgttttactgtcagtcgcatttttctctgctcattccaccgtattagcctgggtcagttcacggagtccaaacgcaaaaggacaggcgacatcgttttatctgctttgctactactctggcggtgcagtaatggggtatttaaacgggtatcttttctcctggcagggatggaatgctattgcggcatcatgtctgatgatgctggggataggattatttatctgccggtttattttcgcaaaatatgagaaacaaccgcaaatcaaaaaacagtcagttcaggagagtttctgattatagacacgaagtgtgtttttatactttccataatggaatcatcattttttcattaatgtgtcactatagctaaaagcttaaattgtgaatatttggctacccggatattcgttgctccaggaatatatatgtctgctaaaacgctgtatgaaaaattagttgagtcacataccattcgtgaacttgataacgaaggacatgttttactttatattgatcgttcaatactgaatgaatataccagcccgcaggcatttagcgggttaagagaacgcggccgcaccgttcggcaccccgacacgtttttattgaatattgaccatgttaatcctacgcggtcgcaacgggatgacttaatgaccgatccgggaggacagctacaggttgattactttcgggaaaatgccgctgactttggcatcacattatttgatgtgctggatccgcgtcaggggattgaacacgtggttgctcatgaacaagggctagtgatgcctggcatggtgatcgccgccggggatagtcacacgacaacctacggtgcatttggcgcgctgggctttggtatcgggacgtcggaaattgaacatctgctggccacgcagacgctggtttaccgcaagctcaaaaccatgcgcgtaagtgttcagggagagctacctttcgcctgttccgcaaaagatattgttcttgaattgcttgaacgtattggcgctgatggcgcgacgggatatgccattgaatttgtgggtgaggccatcagcgcgttgagcgttgaaggacgaatgacgctctgcaacatggcggtagaagcgggggcgcgtggtgccattattgcgccggataaaaaggtttttgactatatctacggtaaaccgcaaatgcctgtaggtgaactctggcagcaggcattgctggaatggtcacagttgagcagcgatgctgatgcggtatttgataagacggtggcgatcaactgccatgatcttgagcctaaagtcacctggggaatcagtccggatcaaacaggttccatcaccggacgtgttcctttcccggaacaggaaaccaatccgcttaagcgcctggcgcttgagaaggcccttcattacatgggattaacggctggcatgttgctgaaagatattcgtatctctcacgcttttattggttcatgcacaaatggtcgcattgaggatttgcgtgccgttgcgaaggtgcttgaagggcgcaaaatcgccagccatgttcgcgggatcattgtgcctggttcaacaatggtaagacgccaggcggaagaagaaggactggcgaaaatctttattgctgccggttttgaatggcggcagtcgggttgctcaatgtgccttgcgatgaatgaagatgtattgtcgcccggcgatcgctgtgcatcaggtacgaaccgtaacttccctggacgacagggcgctggagcaagaacgcatttgatgagcccggcgatggttgcggcggcggcggtagcggggcatctggtcgatgttcggtcattacttcaggcaggggaataagatggatacgtttaagcaaatcagcgggcgaattgcgccgatgctggaaccgaatatcgacactgatgtgattatgccaaaacagttcctgaaagggatcgatcgccaggggctggataaaggggtgtttttcgatcgtcgctttatggctggcggccaaccaaatcctgattttattctgaacatgccgggctggcagagcgcgacattcctgctggttggccccaattttggctgtggatcgagtcgtgaacacgccgtatggggattaaaacaactgggagtacgggggctgataggtagcacatttgcaggcattttcgatgataactgccaacgcaacgggatcctcacggtctcattagatgaacctgctttggcgcgcctggcgcagcttgccgcgagtgctgataccaattctatcactgtttcactcgatcgctgcgaaattacgacggcagaggaaacgatctcctttgtgatcagtgaactcaaacgggcgatgctggccgcaggcgaagatgcgatagcctggacattgcaatacttgccggagattgaaaattttgaggttgcgcattattcacggcggccgtggctaaaacgccctgcatccccgcgcggttaaggaagaagactgcaatgaaactggttcaatatcttgtgaacggtggcaaacgctacggcattatgcaggaaaccggaataattgatctctcgcagcggcttggcgacaaatatcccactttgaaatctctcctgtgcgctaatgcgctgacggatgcggcgttatggtgtgatgagccggcggattattactaccaggaagtcacttttctgccggtgattgacgatccgcagaagatcatctgtgtcggaatgaattatgccgataagcgtattgagtttaatgaaaccaacccggccccaaccctttttgtccgctttgcggattctcagaccgggcataatggcctgctgctgaagcctgaaaataccaatgagttcgactacgaaggtgaattagccgtagtgattgggcggcgatgctcccgggtcagcgctgaggatgctttagattatgtcgccggatacagctgctatatggatggttcagtgagggactggcagcatagctggtttacggctggaaaaaactggccttcgacaggatcattcggtccgtgtctggtgaccacagacgacattcccgatccccagatgctacgtttactgacacgactaaacgggcgggaggtgcagaacgaatctacggcaaatatgatccatcctatcgcttcactcattgcttatataagcacatttactctgctttcccctggcgacacgatcctcacagggtcgcctggtggagtgggcaaaaaacgcgttccaccgctgtttttacacgatggtgatgttattgaagttgagattgaacatattggaaccctgcgcaatgtcgtccgggatagccgttatttaacatcctctgttagctggcatgacgggagaaagtgatgagtacactgattgaatgcggcgcctctccgtttattccggggtttgcgctcaaggatgttcgtctggaaaatggtctgacggtaagagtggctatcggaggcagcggttcacctttggtactgctacatgggcatccgcagaatcatacaacatggcggaaagtcgcaccgacattggcgcaaaatcatacagtcattttgccggatttgcgtggctatggcgacagcgataaaccaacgagcgatccggcgcaccgtacctattcaaagcgcaccatggcgcaggatatcgtcatgttaatggatgcgctcggcttttcccgttttgcctttgtagggcatgatcgtggcggacgcgtaggacacaggctcgcgctggattatccggatcgtgtgacctgttgtacttttatcgacattgctccaaccgcgacgatgtacgccttgaccgataaatcctttgctacgcgttacttttggtggtttttcctgattcaacctttcccgttacccgaaacgatgattgcgcacgatccggcattttttctgcgtaagcatatttctggccagctaaaaatagagggcgcgacctcgcaggaagcattcaatgaatacctgcgctgttaccagaaccctgagatgatccacgcgatctgtgaggactaccgggctgctgcgacgattgatttggacgatgatgccgcagatacgtcggcgcgtatccggtgtccgttacagttgctgtggggagggctgggaacggtagggcaactatataatgtggttggtacctggaaagaaaaggcgctaaacgttcagggggaagcattgccttgcggacactccccgcaggaagagtgtcctgagtactttatccagaaacttcagtcctttttacattcagtgttataactcggtcatcctttgcaacttcgcactgatgctatgaaaacgacacctgtaggaaaaaaacatcgccagccccttgagggctggccttctgttgaagatcttttcgtttttgtcaccgttgctcgcaacggtggatttgcccgggcagcgctggagctggggttatctccctcctatatcagcaaacgtatcgctatccttgaaaaatgtctcaacgcccggcttttttttcgaaataacagagtgatgcgtctcacaccggaaggcgaaaatgcgctgggtggggctatgcaggtcgtcagtgaaatggatggctttgtcagtcgtttggataatcaacgtggtgtgttggctggtaatatcaccatcaactgctcatttggttttgggcataaatatgtcgcagaggcgctgtcgtcatttatgatcgcctatcctgatattacggtaaaactcacgctaacggatcgtgaagtggatctggtggaagaggggatcgatattgaaattcgcgttggggatgatatcaacgaattgtatatcgcacggcagttagccactaatcgacggatcctgtgtgcttcccctgaatacctcgaacgccacggcaagccagagtctgttagtgcgcttgtgcagcacgattgcctaatgattcaggaaaaaaactcggcatttggcaattggatattaacggacggtaagcagcagacacattgccgactaaacggttttcattcttccaacagcggcagtgtggtgcttatttgggccctgaaaggccatggcattacattgcggtcggaatgggatgttgcgcagtatattgaacgaggtgagctggttcgcgtgttgcctcagtggtatcaggaagcgaatatctgggctgtatatacccggcgttcatcaagttctgatcgtatcaaaatctgcatcgatttcctcacggagcatcttgcacaatgcttgccaggcggtaaagcaccgggcgtactgtgatcagtcggcgccaactgtcgtggcgccagatgctctgacttacgtttactgttaggtgttctttttgccagcacccagtagcttttagggcgttgcgttggtggcgcggttttgtttccgctatcgtggcgaagttatcttttatcccaccacgaggcccaacctccacatagatacctccattattaccggatttctcacctggttttaacgtcatattttatctcctgatttttgggtgacgattatcggaggttgagaattctattggtatcggctggatggcattgtaagtatcacacactcactccataacaatcagattgattgagcgactactttagctcaatagatatgtgttcatcttaagcgtattatcgcaggttggtaattaaaattctttaaaaaacaataccatccatcaattcaatatgctgatttttcgaggttttctcaaatttagttatgcttatgtaatgctacctaactgactaaaagtaatgctcttttcacacaaaagccttaacagaggaaacgcaatattacgtgacttaatgcctctgctcattctcattagttataccaatgtaatgttttctcacagcaaaagagaagtagctacctgtgcagcattataggcggaaaatccattgggggtattaccaaagatgaaatagaaaattaatattattaattaaatgaatatgaaacaggtattgttcctgttatcgttacaaccttttctgtcataacaatcttctcattttctttctcgcatacttgctgagcatggtataaatgtctatgaggacgtcagctcggaaagcattcgttctgcatggtatgcctttcgctattctcaggggcgtgaaatgaaagttttctttgatggagtctatataactatatgaaattgataataatcctccttctcgcgctattcccgttatgttcatctgccagcaatcattatgcccttgtttttgaaaataacacgatactgcttgttttaaatcttaaatgttctccctgtgatttaaactgcgcaaatattcaataccagattttcaataaagagacggagtctgttatttcaggggttgctaagcctgtgacaacgggcatcgaaaataattttcgtggttatatgatgcgtaataataatacgttctacacattaattgaatcagataatgaaaacgtatgggatatgtctgttgaggagaagggaactcaacagaacaaagatgccgtgcaaaaagtaaaatatcagcttaatgctatttttgacaatggtacatgctgagtctggcttgcctcagggatacgatcgtatccctgaatatttcccatcaaaactcaggagtaaaatcattctcactaatatatttttccagtatggcggtatattgtcgccagttcccggagtcattgattactgcataatttatcgatgctcccggcgttggcgagcgtgttagcggcacatcacgtgctgttttcggcgcaaccatgatatcgccgatactttttttgtcatccgtcgttagtgttaaactcatataccacgaggtggggttaactatccgtatagtattctctttagcaataaagcgtaattttttctcctccgcttccgtgggcgcttttagcccagtcgggcgaattaaaatttttagcctcaaacgaagcggtaacaccagttttcgcgggtggtttttaatgtcctgggtgactggcggtatctgataaatgtttagccagaagagactctcccggtccgttgccagctgctggcgggaactcaggagcaggcgaagcgttctcagttctcctggctgcattttaaataccggcggcagcgccaccagcggcgttttgctgttatccggagaggcgtcaatgtttccggcgtcggtccatacctgtaacagcatcggcgttgtattatcgttggataatgtcaacgattgagcgacctcatctgaagcaaaaataattcgggttctgtcaatattaacggcagcttgtgccgggccataccatcccgtcaacccaagtagcgttaatatgactttactgaaaactaaccactgcctgtaattgcgcattcacgcttcctgccgttactgtttgtccgccgatcgcctcaagcgaggcagtaaaatcaccgctgtaggtttctactgaaccggatgatacccgtgtggttaaatctttatagccataccagcctcgggcgttgccagtgcctgtcttgatccgatcgggtaacaggttaattggcgtaccggcatcgttatagatgcggatacccactccggaagctacgccaggttcgccataatgggtgtccagtagccacgacagaccgcctgcggatgtggttagccccaagcgacgcgccgccgccacggcggtgggttgattaacgacaaaccccattgcgacattagcggcgctggtggacgggagggcactggacacggcaccggactcacattccaggctgacgtggaaaggcgcctggctattgcctccggcggctaatatgccgacggcgacagggggaattttcacgatcgcaggataatctgtgattttacataacgcgccgcgaacataggtgacgctattatatgtactccatgccccgggccaatagctgggccagccataataatcgctggcatgatccagtcccgctttgatccgctcggtaatcaagcctgggcctttaaacgcgatataaccccgaggctgcgtccaggtatctcggtccattggattctggtaggcaaaatattttcttgagtcaattttaaacatctcatatagcacgttgctaaacgcgctggcaggaatataaatatatttgtcatcctgaaaccaactgtctgcggtaagttggcgttctttccagaaacggctgtaatattcgccggtactgaggtttgtcatacggacagcaacattacgctccacatcataataggcgccttctacttcgggagtaaaaaatgcccccgcaaaagcgctatcgccatttgtcgaatacatctcatagagcttcccggcatcggcagtatcgcagcggtaaagtacctgtttactggaatagggcgtgccggtggcggccgtcaggaagttaccgatcccactggccaatagcgtgccggagggttgaaatgtttcactattactgacgctaatcaccgttggcaaaccgatattaccggtatttgtgtcagttgcgccgatccagttttgcgccgtgtagcccgcttttatcgccgcgtcagagagcgcgctcttatcggtgactttgatacatgacgaccatgttccggcgctgacaaacaggctggtgataaacaatagcgttcggaaactaaaaagcattgtgctattccttctcgcagattttgttcagatagagaaacggttctttggtgtgaagatcgagttggtaggcaacccggcaacgctggtttgcccctgttccccagcgcaccagtagagaacccgacggatgggcgatacgggcataaatctgcccactctggccgaccatgccgatgtttgtgccttcaccgttgaaaacatcagcgcccattggcggtatgccgccatccggcatcttcacggagatcagcactgctttgccgctgatagtggcgaaattgacacgcgcgatggcgccagcatacggcacaatctgctgacttcctcccgtcagttcggcatcgctgcgcatcttacgggtatcgagcgtaacgttattgacgcggtaaggagataacgaaggcagaatggcgtaaccaaagcgatcaaccacagcgccctggccattttgtacgatcgcgccctgcgcgccatcggcatgaataagcgcaaaggtatcgctggtataggggccagccgtcagaccgccagggtgaagaaccagggtgccggacgcgcccagcccttcctgacgatagttatcaccctggtcatagttggcgcgaagtgcgccaaaccgggtgttttgttgtagattaccgccaaacgtcgttggcgcgctgctatcactatcactattgctattgcgataacgctcgtagccgccataaaccgaccatgacaggtcgctgttttcaccgctactgccggtcatggatacggttgaggaacgactttgactggactggttataattcatggcgacagacgttctgttttcgccccaatccagcggtatagagacattaaacgacattgtggtttcggtatatttttgtcggctactcacgtccagtggttcgttaacgccgtgataaaagcgatcgtaatcccaggtggtgcgctgtcgtgcgatattcaccccgtagcttatattccgccactggttgctatatcccatttgtagctgtgttatacgcgattggttattgtagtagtctgcggtgctggcgctgaggttaagcgtgccaagccgtcctaacggctggcttaccgtcgcggacaggcgattgcgctgatgcagcgtgtcggagtagtaatcaatccccgtttttgcttcccggcgtacgccgagcacgtcctgaagatcgcgaaagccgttggttgaataacgataagccgccagtaccaggttagtgccggtggtaaacgttttgctgtaactgagttccgcgcgccagccttgttggcgatcgttatgctctgcgcgcgcattcgaccaggtggcgttaaggccgaacgcgcccataccggtggcccagacgccgcccgccagccatgcctggtaacgctgcgcaattcgtgaaccgaggttgagggtaatggtgttattaacgccgtgctggaacgttccctcaaagaaacgattttcaatatcgtagtactgacgaaccctgccgaaggccagcgaatagtgccagttaccggggcgaaccgaatccggcacggaagaataaggcacggtgaaacgtgaggttttaccgctggcctcgataacctctacctccagatcgccttgataacgggtgttgtacagatcgtcaatataaaatgggcccggcggaacgttggtttcataaatcactttccccagttgttttactaccacgtgcgcgctactggccgctacgccccgaacttccggcgcataaccgcgtttgccctgcgggcgcatccgctcgtcggtgacaagtttagccccgttaaaagacagactgccgaataagctggagtccgtatagctatcgcccagcgacagaatactgttaacagacgcgacaggtctttgcacccaggttcgaacgctattatagcgccaggcgcttccgctctggttgctattggcatagcgcagattactttgatgacggacctgccaaagtccgaggttaacgcccatgtttaaaccgctccataagtattggtagcgataatggctgtcggtattttcggtgtgggtccagtttgtgttatggcgtaaaaacagcgccagcgcgccgctatcccactctgaaggagagatataaccgcgcggtttgtgcgtaagttcggtcattggaatcgtcagcaacaggcgaagcgtggcgctatcaaattgccaaccggcatgaggcacccactccctgagcgggcgacactcggtcgcagcgtcggtcgcggggagtgattttatctgtgccgctttcatcaccgataagggcaggcagggttcagtctgttgaccctcttttacagcattaaatcgaatattagtgctcgaggttaccagcgtgccattaacgtaaacgtcggcaagatagtctccggaaggcgtttgccgttcattaaaacgggcaatattttgtccgtaagtggccccctgaagtagcgcaggatcaaaataatactcttcactttgcgcggagcctgagcaaactatggcgatcaatagcgcaaggcttttgcggttcaaattaatggtgggggacatcgtagctctcgcttatccttgcgcccaggtcgttaaccaaagtaacggtgactgtaccggagaaggatttgagtgaccgtttgcccggcagccaccaggtttgactggagaaaggggcaatcatgtcagcatccaggttatacgaagcgccgttcacttttacattcaggttacttaaagaggcaaaccagggctgcggattaacaataacaataccgctttttccggaacccttatttaccgttttaatctgtagttttttcgccagattatcaggtttacctagcccgtcaggacgatagaaaagttttattcttgagcgcagcatcaccaacattttattttgcccgctgtcgctgccaatattcgttggtggtacctgtaatacgttaaaccagaatactgactcacgatcctgcggcaattttttcgtgttgttataaattacgcgtacaacctggcctgctttgggttgaatacgaaataccggcggcgtggcaatcaatggcatcgcgctgctattttccgggctggtattcatatcgccatcgtcaaaccaggtttgtacgatataaggtattgcatcattattttttaactgcacatctacggaggaggctgttgatgggtaaattattcggctacccaaaatagtaacgctcgcccacgatgctgtggcgggtagggccaggaatagaaaaactattaagtaatataatgcggaatgtcgggtatccattttcatctcaacaactccctagcgattgaaaatggtctggcgtttcaacgccagaccgtagcgacaattatttatacgaaacggcgtattgaagggtggcagcgactgtcccagcctctgctttcccggtagagtaataccgcgcggtataagtcgcgctcgcttcagaagcatttggttccagctgtaggtcgccgtcgccagtaaagccgccggtcagattgattggctcccctgaagtgtcgagtaattggacttcaacatttttcgcgctgccagtattacccaggttaccgttactggtgacctgattaccgacaaagacagtggaaatttttgttgttttgtcctgagagccggtacacccggacagcccaatatcaaacgttattggccccgcggttttcccttgttctgataaatctttagtacttactgttggtaataacacgacgggtttagcctgattaccattaataacgacagagcatgtttcatcagagacttccccttgaaaggtgatggtgttatcagaaacagccatcgcgctgctggagacaagaagtgagcctgtgatcattgctaaatattttttcatagacatatgataatgttcctgtattaatctttactttttcaggacgagtgcaattcgcccgaatgtttcgtgcttatggaggagtggtaaaaataacgatcattaactctatttttggatgtgagctataccctcctgactattgataatgcgatataaaacaaacagacttatttctcttatcatgaaatagagcgataagcgctttcgtccatacatctcattagtacaactgatagtgttatcatttgattgagtgtaatccgataacaattctctccgcatctgaatagatagactatgttgcaatacaaacctgcacatttttgctatgtaaaatccgtatcagttaaacctcccgatggataatacgatggtgagattaaggtaaattttctgaaatgtgcttctgaaacagtataattagtcttacttttttcttacttttggcctttcagaagtttcctgagtttgcgttaaggtaaagaaaagtgttcagatttacctataactgtttgatttgtaatgtgtaggtaatacttgtgtcaattattgtttactataagtgagacttataagttaaactcaggttaattagggggctgaattcttttttgagcatgataatatgtcgtctgaatgatggatgcagttacctttaggattgtcatgaatgaaactatatttttacttgataagcgtgttgtatttgatagtacgaagatgaccttatcgcatggtaatgagataatcagaatatcagaagctgagacccatctgcttcttgctttttggcatggtctttacaaaaaagaagatattattcattttgtttgggaaaatcgtggaggctgcgtctcagaatcaagttactataaactcattaatcaaatgagaaatgattttagtagcattggtctacagtcatctgacatcgtaactcgccctcgggtgggggtatcgctgtctgttgccattgaacctataaaaaaaatcacctccctaaaggtgagtgatgaaaacgttaaaggcaccacgactcgggagaacatattttacaaaaataaacgtcacagcgtatttgtggtattaacaggagccattcttctggcattgctctatggtgtatttactatatataaagcgcctgttcgtaacagccctgatagtttttttacatatcttggcgaatataacgattatgcaatctataaaacaaaagaggataaggtcacattaagtgaagtagtttttgcttttaactctctaaaaattaaaatttaccggcaaaatggacgccatctttattatatcagggagcctaatatgaatatttttctgcaatgcttaaatcctgttgaaatggcggtgccaaaatgtattacagtaaaagaacgttactgattatatttgtaatatttatcgccattgtcgcaatcggatcgataatagcgcttgagtgggtaaatcgtgactcttatagaaccaataatcttatatgcacgacaaaatcagaagcgtatattgcgccacgaaaattgtacatggatggtggacttgtgctggatcttaaatccggcaggattaccctacactacgatgttactaccgatacgaaagagaaacggcttttttttcgtgatatctgcatcagcaaactgcgcagaacgggtatgaaaacatttacttttaaagtcaattcagttaagacttttgagtctgatactgctggcgatttgttttcctggttgagactgttacagcctggtacgattaatgagttaaagatggtcaaaattgggaaaaatacctacatgttttcgcttaatcgacatttgtataatgtgtgtaccaccagtagtaacgttgagttgtagccaataatccctgtattgatgggaattcgttccgtgatttatgcctcatcaggcagcgaacctggtatcaggctaacatattgaatttagatatctgctatcgcttattctaacgatagtatcctgcacctgttgggtattgatattttcttgtctattttcggcacagggagtgccatcttgctatcattaagaacgtataacctatctctcaatattgcttttctatattaatgttactttagttatcctatcaaagcgtacagtggcaaaaggaaggccggtaagagggcaatgatttgaaagtaagaaagctatttctgatgttgtttattgccgttccactgatcgtaatgatattggtggggttactcgcgggtatcttccagctaaaacgagatatcgccgtcagcgccaatacgctgctgcggtttagcgcggatatatccgccgcctcctggcaagtcgccggaaaagccgccagactggctgagagttcctgcactgacacgctgaaagaactgtccagaacgcgggccttcactccttatgtccgtgacattggatttctggaaaatggtgatatcacttgctcctttgtcacaggaaccgaacgctatcatttttcccggctggcagggctttctttacctgcttcttatccggaacggtggttgcgatctatcggtagtatggccgaaggacccgatcgccttgttgtggtgtatgtgaaaaaagtagcagcggataaagcggctttcgtcattgtggattcgcagtatgtccaggagctcatggagatattggctgcagaaagagcatcagcctttagcctgacattcggcgcaggagaggcgattaccagcgctgcgaagttgcgcggtaaggcgtttttaacgcagcggttcacctcaaccgatcacactatccagctgatggtgcgaacccctttctcaacgttatcggcatactggttacaaaacctttttatttttattccgctgtcattgtgtctttctgtagggatgatgttgttctacaggcgctggtatttaaaacgcttatctctggcccgggagattgccaggggaataacgcacaatgaatttacggtacattatcaacctgtttttaatgttaaacacggtagttgcggcggcgtggaggcgctaatgcgctggccgcaaccggatggccgttttataactcccgatatttttattaccgccgcagaaaatgaaggcatgattattccactctctcgtcatctgttcgaactgattgctcatgacgtgataaactggactgtaccggatgatttctatatcagcgtaaatatatcgcctgcgcatcttatggatgacggttttatacaagatatagaggcgctcaggactcgtttgggaacgataacgcttatgttggagctcaccgaacgtagcctgattgtagaaccttcacaggtcgcagaaaaactttcaacgctccgtgaaaaaggcgtgttaatagcgattgatgattttgggaccggctattgctccctctcctatctccagcaattacctgtagactctcttaaaatagacagaacgtttatcgataccattgataccagcagcgatgatgttcctgtcctggatactatcattacgctgagtcagcgactgggactcaatgtggttgccgaaggggtcagtacccagcaccaattgcgttacatcttaagccacggggtaggattcgttcagggatttctttatgccaggccgatggggactaatgactttatgagttggcttggcaagtcagcccagcggcaaaatggtttgctcaagggggaaagcggatccgcgagcgatctggtggctgaataatgcaggaactcgctacggaaaaaaattcaatagcacgatatatcctggtaatatgtttatgccgtgaagaaacgtgatagcactggggcggatatttttatgagtcagaacaattatctgattgacaaaagggttattcttgattgtgaacgaatgacgctttcctgcgccggagagtcgataacgatatctgaatcggaacgcagtttgcttatcgctttttatgaaggcctttttaaaaaagatgatttaattaactatgtctgggggcgcaaaggtgtcgtggtctctgatgccagttattataaattgattaaccagctacgagggtcatttgataaaattggtcttaagggggcgtctgttgtgactcgccctcgcgtgggtgttttactctcagtttccattgaaccgttgagtgatgaggcgcaaaatacgccgttgcctgctgttgctgaaacagaagtatcgacggttgaagtgcggcacgatgacactattattaccccaacaccgggcgctgtgaataaaaaagattggctctacttttgcctggccgcgcttctgatgttttttatgatgtataaagttaagggtgaaaatattgattactttaccctccagggttcgtatgatggatacactttttatagtgtcgggcatgataaaacccatctgacggatatcgttgaagcgtactctgagatgagtaatgaaatacataaacaaaacggaaaaatcatttattacattcgtgtgcctaacacaaatatttttgtccagtgtcttaaccaacttgatatagcggagccgaaatgcatttccataaaagaacgttattaagcgtggcgacgcttggtatgctggctgtttcagtcgtactgatggtagtttgggtacgaaacagtaaccatagttctattaatactaatgaatttttatgtacgacaagaacggtaacgacgatacagcctaaagatatccatgccgatggcagtcttgttcttgattttaagatgaagagaattacgcttcaatatgaaataaaaacaaaagataacggtgtaaaaatattataccgggacgtgtatatgaaaaatttacatcgaacagcgcctggtgtttatacgttcgaagtatcccaggtaaaagtctttgccacggatacggctggcgagctgttatcacatttacgggttttgcatccggaagcggctaatgagattcgaatatctaaagtgggtgagaaaacctttttctattctcttaatcggcagctttataacgtttgtaccgcgcagtagatctgaatgttgtctgaatgcgtcagaaagcgagttgcgaaattgccctccgcaagggtaaaggttaactcgaacaccagttaaagagcattaaaaacaatgagttatgaattttttactcttcatggaggtaactgatactcgctgataacctctcgcagtccgcctgacggatgcgatgccaggatcgggtctgaagcaaccatgaatccgccattaataaaaaagtaagaactctgtaagactgatttcatatccattatcgaatatatcaggttatattacctccgcagttggcatgactggtaataagcgcattaggtgctcttaatctaaatgctatttgtgtgccataagttccggtaccgccttaattatatattaaaaatggagtggttttaatgaaaagacggtcttcgttccttgtttttttaggtttattattagcgtcacctttagctttggctaacgatcagcacaccgtatcgtttggttatgcacaaactcatctcagttcattgaaaaatagcgatagcaaagatctgcgaggctttaattttaaatatcgttacgagttcaatgagacctgggggatgttaggctcattcaccgcgacgcgcaatgaaatggagaactacacctggaaagaggggaaattgcataaaaatggttccgattctgtggactatggttctttgatgtttggaccaacatatcgttttaatgactatgtgagcctgtacggcaatgcgggtatagcgacgatgaaatttaataaacactcaaaagaagactcctttgcctacggcgctggcgtaatatttaatccagttaagagtatatctatcgatgcatcatgggaaaccagtcgtttcttcgctgtggataccaatacatttggtgtcagcgtaggttatcgcttctgatattaaaagtataagcgttacgtttatggcaaggaattaaaaataatatggcgctgctacagaatagggatggttatgagcgctcaggtaatcttaagaggaagataaaacactcaccgtagcgttattctattgatgaaattatgataaattcactatcggaacaacttccgttaaaaacgataggtatagttttaacggatgattattatacttatttaggcatcgcttcactctttgaggatgggaagtgctttatgttcccactcaatggagaatataattcgtgtcagatatcagctagcgaagatatcataattattattgatggacgagttttgattcagggggtctggaaaggttttaaggcgctcatgcagcattatccacatgctcgtcgaatctggctcacgcgcagagatattggaaaactttatccacatggctgcgatagagatcctgatatcgatcccgatttggcaaagcctgtttttattgagcatttcattaaatacgcttgtgcaaacgatgtagcggtcggtgaaattgcgccgttgacaaaaaaggaggaggagttgttatggcactttttatataaaaagtcgatgagtcagatcgccagtagctatggcatgagtcgtaagactttgtacattcatagattgcgtatctgtcgtaaatatggcttcaaacgcttttttcatttgctatttatttaccaaagaagtcgccatatcttcgcatctaaaatttgccgtgtagacaaaaacgccgatcaggcttgaagcaaacaagatgaaaaagttaacgatgagagagtgtgaaagcatcaatcctactatgctgcttgccattaagatacttatctcggcgcttgacgaaaaaacaaaaataagactcagagagcatattgaaaaaactgaacaagaaatagcctcaagcatacatgatagcatcatgacagagacttttcttcagcaaatgaaagacattcgttacatcttaaatatagttccttgacggcgttcagaagcaagaacgcgttattatttaatgattaatagaccaggtattagtatgaaaaagatcttagtatgtttcgtcggcttggctttaaccgcatgtagcgctaattcgttgaattatggcgctgaacaggtacgggtgatgaccagcgagccaggtaaggaatgcagctacttaggggatatcacgggcagccaggggaatttctttaccggtggctggacttccaacagtaacctggaaacgggtgcccgtaacgatctgaaaaacaaagcttataaaatgggcggcaatacggtagtcctgttaacccagcgtgcaggccagacaggaagttcatggcacggttcgggctcaagcaaacaaacgaatgtcacgttaagcgggaacgtttatcgttgccctcgttaaccttattttgcaggtaatatatgcctgtttagcgcgcgcgccgcactggcgacgcgggcgctatttgggctaaccttgctttttctcactgtattcccgccaaccgccgcctaatgctttatacaggttaatgatatttaactgttgcatgagacgtgtgcgtaccaggcgctgttgtgcgccataaagcatacgatgggtatcaagcagcgtaaggtagtcatcgacgccttcctgaaaacggagtccggccagctcataggcgatttgactggcttcaaccgcgcgttgttctgattgcacctggtcattcagcgtacgctgtcccgccagaccatccgccacgtcgcgaaaggcttgctgaataacgttttcatacctggcgatttcaatctgtttttggacatgcgccctatccaggtcagcgcgtaatgcgccgccgtgaaagagaggcaaggtgatttgcggtagaaaacgccagcttcccgatcccggttcaaagagtccgctaagagacgcgctggccgttcccgccgagcctgtcaggctgatggtcgggaagaaggcggcgcgcgctgcgcctatccgggcgtttgcgccgcgcagcctgtactcggcggcgcgaatatccgggcggcgtaccagcagatctgacggtaatccgcctggcagtgtggtcgggatcgcgccttctgtaagcgtgaccgcttcgtttagtcgacgcgacagttcaggcgtgagcggctggcccaacagcaattccagcgcgttacgatcccgcgccaactgtcgcgtatacgccgcgcgattgatttcggcagaacgcagcgcgatctccgccatacgcagatcgagctgtgtggcgttacctgtccgggcaagctgggtcgtcaatgtgtatgaacttttttgcgcggccagcgtatcctcggttaagcgcagcagctcccggtcagcccgtagcgtcagccaggcgctggcgacttcggaaaccaggctcattcgcgccgcaatgtacgtctcatcaagcgccatataggcggctaatgcctggtcgctaaggcttcgcactcgccccagagatccagttcccaggccgtcgtcgccccagccgcctcgtagcgtcggttaatctcagactcgtccatgacgctgagatcggcgggagtgcgactggcgtccatggcggtggcgatgccgagcgtcggcagcatctccgcgcgctgaatgcggtataacgcccgggcggcttcaacattgagccctgccttgcgtaaatcccgattattgcgtaacgcgatcgcaatcagttcctgtagaagcggatcgtggaagaaatcacgccagccaatgtcagcggcatccggcgcgccagaaacggttgacgttgcgtagggatagaccatcgcagtcggcgatgcggggcgttcgtgcttcggcgccatcgtacagccagcaagcgtggtgacgaaagcaagcgtcgccagcgtggcggtctgccgatagcctgtaaaagtgatcttcattatgccattcccatcattatgcttgctgatcatgcgaatcaacgcggttctcacgctttaatgccatcctgcgaaccaccacgtaaaatacaggcgtcaataacaggccgaagagcgtgacgcccaacatgccggcaaacacggcgatgcccatcgcatgtcgcatttccgcgccggcacccgtcgcgagtaccagtggtactacacctgcgataaaggcgaatgaggtcatcaggataggacgcagacgcaggcgggacgcttccagtacggcggtcagcgggtctgcgccgtcgtgttctttggcgcgggcaaactcgacaatcaaaatggcgttcttggccgccaggccgaccagcaccacgaaaccaatctgcgtaaagatattgttatctccgccagatacccacacgccgacaatggctgagagtaatgacataggcgcaataagcaggacggcgaagggcagcgaccaactgttgtactgcgccgccaggatcaggaaggccagcagcaccgccagcgcaaagatagcaagcgcagagttgccggcctgtttttcctgataaaccagatcggtccattcgaagaccatcccttccggtaacgtttcacgcacgatcttttcaatcgcgtccgtcgcctgtccggaggagaagcccggagccggtccaccgctaatatctaccgaggggaagccgttgtaatggatgattctgtccggccccgactggcgcataatcgtgacgaaagcgctaagcgggatcatctcgcccttcgcattgcggactttaagcaggccgatatcctcttgctgcatacggaatggcgcatcggcctgcgccatcacccgccaggcacggccaaatcggttgaaatcgttgacgtaaagcgagccgaggttaatttgcaacgtttcaaagatgtcggtgagcgatacccccattgatttcgcctttacccggtcgatatccacctgtaattgcggggcgtttgtctggaaactggccagcatattggccagttcgggcgtctgcatcgccttagacataatctcgctttgcacctttgtcatcgcttcaaatcccagttccgcacgatcttcaatctgcaatttaaagccgcccgtcgcgccaagccctggaaccggcggtggcgggaagatgccaataaatccgtcgggaatgtggctaaatttgtgcattagctttccggcgatagcgttagcggaaagcgaaggatcttcacgctcgtcaaagggtttcagcatggcgaacatcagcgccgaatttggcacatttaccgggccgttaaccgacagaccggggaagacgacgacgctttcaacgccgggttccgccagcgcgatagcggacatctgtttcacgaccgcctctgtgcgatccaacgatgcgccgcttgggagctgggcgatgccgacgagatagtatttatcctgcgcaggcacaaacccgttcggcacctgatggaagccaagccaggtcagccccacaaagccagcatagagcaccatcacaatgacgctgccgcgcacggcccgacggacggcgctaacatagcggttcgacgcgctgtcgaagaaacggttaaagcgatggaaaaaaccgccagtgaccgtgcccatcaaccgcgttagccagtcagccttcgcagtatcgtggtgcggtcttagcaaaatggcagccagcgcaggggagagcgtcagcgagttaatggccgaaaggatggtcgaaatagcgatggtcaacgcgaactgacgataaaactcaccctgcaggcccgccaggaatgcggaagggataaagaccgccgttagcaccgaggtaatagaaagaatgggaccagtgacttcatccatcgccttctttgccgcctctccgggacttttgccctgcgagatatgccgttccacgttttcgaccacaacgatggcgtcatcgacaacgatacctatcgacaggaccaaaccaaacagcgaaagcgtattcagcgaaaagccaaacaggtgcatcaaggcaaaggtgccgaccagcgaaacgggaaccgccaccagaggaataatggacgcccgccaggtttgcaggaacatcaccacgacaaggacgaccagcacgagggcttccagcaacgtaatcgccaccgattgtagcgatgcgcgcacgaagaccgtaggatcataggcaatccggtattcgatatcctgcgggaagttttgctgcaactcatccattttgccgcgaatcgcgttagaaacgtcaatcgcattggcgcccggactttgaataatctgtaacgctggcgccgcttcgccattcagtaaactgcgcagcgtataggcatctgcgcccagcgtgacgcgggcgacatcacgcagacgcgtcacctcgccgtcagcgccgatttttaccacaatctcgccgaactgttcttcgctggtcaggcggcccagcgtgtttaccgtcatctgaaaagcggcggaggcctccggctgttgcccgacggaaccggcggcgacctgtacgttttgttcccgcaacgccgtaacgatatcactggcggtaagaccgcggttggcgattttcgccgggtccagccagacgcgcatggcgtactcgcccgcgccccagacgagaacatcgccgacgccgggtaaacgggccagttcgtcgcgaacctgccggatggcgaagttagacaggtaaagcgagtcatagcgtttttgcggcgagacaagatgaaccaccatcaacatatcgggggacgttttctccgttacaacgccaattcgctggacttcttcgggcaggcgaggcagcgcgcgggatacccggttttgcacctgaatttgcgccatatcaggatcggttccctgttcgaaggcgatagagataaccatgcgaccatcaatggccatctgggtattcatatacaacatgccgtcaacgccgttgatcacctgttccagcggcgcggctaccgtatcggcaatcacttgcgggttagcgccggggtagctggcgctaacctgtaccgtgggcggcgtaacggccggatattcactcagcggcagttttaaaaaggcgatagcgccagccagcagcattaacagcgacaggacgatggcgaagatggggcgtgcaatgaaaaagtgggtgaatttcattggcgcaccgccttcggcgcactgtcgccgtccgctttagtcaatgtcgcggtctgtttgtcggtcacattctgccgcatcggcaccagacgtggcgcaacggtcatgccaggacgcaccagccccttgaggatgattttttctcccggcagtactccctgtgtaacgacgcggaatccatcgaccatttgtcccaactcaaccggacgatactccacctgattctccttgccgacgatcagcacatagtttttgccctgatcggcgctcaccgccagatcgtcaatcagcacggtttcccgcggctcgccgatgggcaaactgattcgggcaaacaggccgggagaaagcattccgtcggggtcaggaatcacggcgcgtgcccggatagtgccggtgctgcggttcatctgattgcccataaagtcgagtacgccctgataaggcagcccgttatcggtggttaaccccatgttgactaccggtggatttttgtcggagcgggtatgccgtaacgccttcagccaggtggcttcgtcaatatcgaaatacacatacatgggattgtgagacacgatagtcgtcagaagcgtggcgttacccgctacgccgccgctgaccagattgccccgggtcaccagtatgcggtcaacgcgtccggcaatgggcgcggtaatacgggtccaggagagttcaaggcgcgctgcggcgacggcggctttggccgattgcatctgcgcctgtcgcgcattacgcgtggcggtgacatcgtcagcgtttttacgtgatacggcgccgctggcgaccagtcgttgaatgcgatcgaaatccgcctgcgcctggcgggccagtacttcagcctgacgtaattgcgcgacggcggtgtcgagggcgacctcgaacgggcgcggatcgatctggaacagcagttgtccgcggcttaccagacgtccttccggaacgctgatggcgtcaagggttcctcccacgcgcgaacgcagctccacggtttccggcgcggccagaaaaccggtgaattccgccgtaggcgcgagtgtacggctaagggctttagcaaccggtaccgacggtggaggcggcgcgctggccggggggccgacggcgttgtctttatcccatagtgcttcgccggccatgtaaatcacgcccccgatggcggcgatgacgccggctatcaacataattttgaatgttctacgcatgtcgtttccctctttaccgcagcgtgtcggccattccgcaacgctgccgcagaatttttggcaaaggctaggcgttacaacgaaggaaaggtcaagcgttcctgacgggtttttacggggcgtgggtcggcatcgtggcgtaaatgtctcgcatcatcctcttttatgagccatctcacattctcgccgaaccgtgcagcctgaatacgcttgaccttcccacaatggcaagctttaggctttctgataccgaatagtcaggatggggaagtcgtcatgagtcagtcagaaaatcgtcacgacacgataagcttacttattgaaggtatgacctgcgcgtcgtgcgtcgctcgcgttgaaaaaggtattaaggctgtgcctggcgtaacggacgctacggtgaatctggcgacggagcgcgccaccgtccgcgggacggcgtcggcggaggcggtgatcgcggcgattgaaaaaacggggtataaggcgcgaccgatagagacggcggggcagggcgaagacgactctgaagagaaaaaagaggccgagcgcgtcaggctgaagcgcgatctgattctcgccagcgtgctggcgctccccgtttttgtgcttgaaatgggctcgcaccttattcctggtatgcacgagtgggtgataaaaacgattggcctgcaacaaagctggtactggcaatttgcactgaccctgttggtgctgacgatccccggtcgccgtttttaccttaaagggttcccggcgctggcgcgtctggcgccggacatgaactcgctggtcgccgtgggaaccgcagcggcattcggctactcgctggtggcgacctttacgcccgacctgttgcctgaagggacggtaaacgtctattacgaggccgccgcagtgattgtcgcgcttattctgctggggcgctttctggaggcaagggcgaaggggcggacttccgaagcgattaaacgtctggtggggctacaggcgcgggtcgcgcatgtgttacgcgagggccgcatcgtggatatccctgtcgacgaggttgtgctgggcgactgtgtggaggttcggccaggcgagcggatcccggttgacggcgaagtgaccgaaggccgcagcttcgttgacgagtcgatgattaccggcgaaccgataccggttgagaaatccgcaggaagcgcggtggtgggcggtaccgtaaaccaaaaaggcgcgctcacgctgcgggcgaccgccgtcggcggacagaccatgctggcgcaaatcattcgtctggtggaacaggcgcagggttcaaaactgccgattcaggccgtcgtggataaagtgacgctgtggtttgtcccgatggtgatgcttattgctgcgctgacctttgtggtatggctggcgtttgggccgtcgccagcgctgactttcgctctgatcaatggcgttgcggttctgattatcgcctgtccttgcgcgatgggcctggcgacgccgacctctattatggtgggaaccggtcgtggggcggaaatgggcgtgctgttccgtaagggggaggcgttacagctactcaaagacgctaaggtggtggccgtagacaaaaccgggacgcttaccgaaggccgcccggtactgaccgatctcgacgtggccagcggctttgaacgccgtgaggtgctggcgaaagtcgcggcggtagaatcgcgttcagagcatccgattgcccgtgcgattgtcgtgtcggcagaagaggaagggatcgcgctaccaggcatgagcggcttcgaatcggtgaccgggatgggcgtatacgctaccgttgacggtacgcgtgttgacgtgggggctgatcgctatatgcgcgaaattggcgtggatattagcggcttcgccaccaccgccgaacggttagggcaggaagggaaatcgccgctctatgcggctattgacggtcaactggcggcgattatcgccgtggccgatccgatcaaacccagtacgcccgccgcaattaacgctttacatcagctcggcattaaggtcgccatgatcactggcgataatgcccgcacggcacaggctatcgccagacagttaggaattgatgatgtggttgccgaggtattgccagaagggaaagtcgaggcgatacggcgcctgaaagcggcgtatgggcaggtggcgtttgtcggcgatggcatcaacgatgcgccagcgctggcggagtccgacgtggggctggcgattggcaccggcaccgatgtggcggtggaatccgccgacgtcgtactaatgtccggcaacctgcaaggcgtgccgaatgctatcgcgctgtctaaagcgaccatccgcaatatccaccagaatctgttctgggcctttgcttacaatacggcgctgattcctgtcgcggcaggcgcgctatttccggtctggggcatattattgtcaccggtattcgccgcaggggcgatggcgatgtcgagcgtgttcgtgctgggcaacgctttgcggctgcgccgtttccgggcgccgatggcaaccccatccgacacatccacgacatgaggaggagcgtcatgaacatcggtaaagcagctaaagcatcgaaagtctcggccaaaatgattcgctactatgaacagattggtctgattcccgcggcaagtcggacggattccggctatcgggcctatacccaggctgatgttaatcaattgcattttatacgccgcgcgcgcgacctcggtttttcagttgctgaaatcagcgacttactgaatctttggaataaccagtcgcggcaaagcgctgacgtcaaacgcctggcgcagacgcacattgatgaactggacagacgtatccagaacatgcagcacatggcgcaaaccctcaaagcgctgattcactgctgcgccggcgacgcgctgccagattgccccattctgcatacgcttggacaacctgacgatagcgagccggaggcgcgtaccggagcggtattgcgacgtcctcgtcgccacggactggcaaagcgtctgtaagtcctgagattacgcttgaccttccaacactggcaaggtccagactggcaacagttcccacacaaaaggagttcactatgcagttccatattgatgacatgacctgcggcggctgcgccagtacggtaaaaaagacgattctgactctcgatgctaatgcgacggtgagaactgacccggcgacgcgtctggttgacgttgaaacgtcgctatccgcggagcagattgccgccgccctgcaaaaggccggtttcccgccgcgcgagaggtaatcgtcaatggcgatcggtctggcgacaggccggtcgcgatacgctagccacgcttcgcttttctttgcgtgagataatccccataaaaagtgtgacaaatcatgtgtcagtaagctttgttaataatatgtaatgatttgtctatttttgctaacattttacctgctatatacaaaaagataacaaataagtagcgcaacgctaccttgttacgtcgctttgacgacgggagcgctccagcgtttcgcccgcttcaaagcttgatgttattttttgatgcaggacactacctatgtacacccccctgaactggacgacgacacaacgacatgtggcgtttgcctgctttaccagttggatgctggatgcgtttgatttctttatccttgtctttgtacttagcgatctcgccgaatggtttcacgcttccgtatcggacgtttccattgcgattatgctgaccctggcggtacgtcccattggcgcgctgctatttggccgaatggcggaaaagtacggacgtcgaccgatactgatgctcaatattctgttttttacggtgtttgaactgctttccgcctggtcgcccaccttcatggcatttctgatttttcgggtcatgtacggcgtggcgatgggcgggatatggggcgtcgcgtcatcactggcgatggaaaccattcccgatcgttcgcgtggcctgatgtcgggcatttttcaggcgggctatccctgcggctatctgttcgcctcggttatttttggcctcttctacagtatggtaggctggcgcggtatgttcctgattggcgccctgcctgttgtcttgctgccttatatctggtttaaagtgccggaatcccccgtctggctggcggccagagcgcgtaaagagaataccgcgctgcttcctgttctgcgcaaacagtggaagttgtgtctgtatctggtgctggtcatggcgttctttaactttttcagtcacggtacgcaggatctctatcctaccttcctgaagatgcagcatggttttgatccgcatctgatcagtatcattgcaattttttataacattgccgccatgctcggcggtattttctacggtacgctatcggaacgtattgggcgtaaaaaagcgatcatgatcgccgcctttcttgcgcttccggtactcccgctatgggcattttccagcggatcattcacgattggtctgggcgcgttcctgatgcagtttatggtgcagggcgcctggggtgtcgtgccgacctggctgaacgagctggttccggcgaatgcgcgcgccgtgctgccagggtttgtttaccaactcggtaatttactggcgtcggttaatgcgacgttacaggcccgcatcgcggaaacgcatggtggcaattacgggttggcaatggcgatcgtggctggcgcggtggctattttaatctgtgtatttgtggcatttggtcgcgagacccggggagtcgtcatctccggtacagatagcgacgccctcccggagtcggccatcagtcatcgcacgtaaacactacgctcctggcgcatactgtcgccgggagcacgccttcctcccgtcgttttcacgccctttcaacgaacaacaaaggttaatgatggcatctgccgttcgtgaccattacaatcatcgcttacttttttctttataagaaattgattgctgcaccttaaaattatcaacggagcgaagatatcatgttgaaagataaccaaaaacacaacgagtctgttgccccgaatagcgcctttctgtctgagttacaacgtgcattaccggaattttttaccgccgatcgctataacgagcagggcgaactgatcgcgaaaggcggatttgatctcgccagatttgagcgcgcgctgaaagcgcgtaatattgatgagctgactagcggttatcagattgattttattggcaaagattacgcaaaaaaacaggcgggtgaaaaatccgttaccgttatcgttcctgacgtggaacacaatactctggcagaaaataaaaacagccataatctttttctgaccggagataatctggatgtgttacgccatctgcaaaataattacgccgataccgtcgatatgatctatatcgatcccccttataacaccggatcggacgggtttgtctatcccgatcattttgaatatagcgatcgggcgttgcaggatatgtttggtcttaatgataccgaactggcacgtttaaaatccattcagggtaaatcgacgcactccgcgtggttatctttcatgtatccgcgtcttttcctggccaggaagctcctgaaagataccgggtttatttttatctctatcgacgataatgagtacgccaatcttaaattaatgatggatgagatttttggcgaaggcggatttgtcaccaatgtgatgtggaagcgcaaaaaagagatttctaacgactctgataacgtttccatccagggggaatacattcttgtttatgccaaaaccggtcagggcgctttacgtttagaaccgctttctaaagagtatattcagaaatcctataaagaaccgaccgaacagtttccagaagggaaatggcgaccggtgccgttaacggtgtcaaaagggctgagcggcggcggctatacctataaaattaccacgccgaacggtacggtacacgaaagactatgggcttatcctgaagccagttaccaaaaactggtggccgataatctggtctattttggcaaagataacggcggtattccccagcgagtcatgtacgcgcatcacagtaaggggcagccaacgaccaattactgggataacgtagcgtcgaataaagaggggaaaaaggagattctggatctcttcggcgacaacgtttttgatacgccgaaaccgaccgcattattgaagaaaatcatcaagctcgctatcgataaagacggcgtcgtcctggacttttttgccggttccggcactacggcccatgcggtaatggcgctgaatgaagaagatggggggcagcgcacgtttattctgtgtactatcgatcaggcattaagcaataacactatcgcgaaaaaagcaggttataacactattgatgaaatcagccgcgagcgaattacacgcgttgcggcgaagatccgcgccaacaatcccgcgaccaatagcgatctcggttttaaacattatcgttttgccactccgacacagcagacgctggacgatctggatagcttcgatattgctaccggccattttatcaataccagcggtcaactggccgctttcaccgagtcaggatttaccgacatgatcaatcctttttccgccagaggattgggcgtgccgggcggcgcaagcggcgaagagaccttattaacgacatggctggtcgccgatggttataaaatggatattgacgtacagaccgttgatttttccggctattgcgccaggtatgttgataatacgcgcctgtatctgattgatgaacgatggggaacagagcagacccgcgatcttctcaaccacattggtacgcaccagcttccggttcagaccattgtcatttacggctactctttcgaccttgaatccattcgtgaactggaaatcggcttaaaacagcttgatcaaaaagtgaacctggtgaagcgttattaagaggggatgatgatgaatattttactggaagaacttccccatcaggaacaggcgttagcggcgattctggcgagtttcaccggtatcgatcacgcgcaagccgatcataatcactatgctaatccgctgattaaggaacgttacgacgataaggccaatattgacgttaaaatggagaccgggacgggtaaaacctatgtctatacccggttgatgtatgaattgcatcagaagtatggcctcttcaaatttgtgctggtggtgccgacgccagccattaaagaaggcgcgcggaactttattaccagcgattacgccagacagcatttttcacagttctacgaaaatacgcggatggaactttgcaccatcaacgccggtgattttaaagtaaagtcggggcgtaaaaattttccggcccagctattaagttttactgatgccagccgtcgtgatagccatacgattcaggttttgctgatcaatgcgcaaatgctcaattccgccagtatgacgcgagacgattacgatcaaacgctcctgggcgggctgacgtcgcctgttaaagggctgcaaatgacgcgaccggtggtcattattgatgaaccgcatcgttttgcgcgagataacaaattttatcgagcgattcaggctattcagccgcaaatgatcgtccgctttggcgctaccttcccggatattgtcgaaggtaagggtaaaaataaatgtgtacgtaaagattactatcgccggcaaccgcagtttgatctcaacgcggtggacagttttaacgatggtttggtgaaaggtattgatatttattacccgaatctccccgaagaacaggccaacaatcgttatatcgttgacagcgtcacggcaaagaaattaatcctccgacgggggagcaaaattgccgaggttggcgtgggcgaaaatctcgccgatgtcgatgcaggatttgaaggcagtatcgaatatgccggcagtaaaatgttgtcgaacgatctggagctggaggcagggatggcgctggtgccaggaacctttggcgcgagctaccaggaactgattattcaggacgctatcgataagcattttgacactgagcaggcaaatttcttacgcagcaatgagccagaaaataatgccccgcgtattaagaccttaagccttttctttattgacagtattaaaagctatcgtgatgacgaaggctggttgaaagtcacttttgagcgtttgctgaaaaagaaactgacgcaactgattgacgattatcagcgcaagaccctgccgcgagaagtggagtatctgtcgtttctgcaggccacgctcgccagcctgcactcggataaccaaaacgtccacgctggttactttggcgaagaccgcggaagcggcgatgaggcgatccaggctgaggtagatgatattctgaaaaataaagagaagttgctcagtttttcagaccatcacggcaactgggaaacgcgccgctttctgttttcaaaatggacgcttcgcgaaggctgggataacccgaatgtttttgtcattgctaaattacgttcttccggtagcgagtcgagcaaaattcaggaagtggggcgcggcctgcggctaccggtagatgaaaatggtcatcgcgttcatcaggaagagtggccgtcccgactgtcgtttctgattggttatgatgaaaaagcgtttgccagtatgctggttgatgagattaatcgcgacagcaaagttcagcttaacgagcagaagctggatgaggcgatgatcacactcatcgtcaccgagcgacaaaaagtcgatcctgcgtttacggagcttcgtttgctggaagatctggatgataaaaaactgatcaaccggagcaatgagtttaaacccagcgtcacgcttaacggggaaaccaaaagtggttttgcgtggctactggagttctaccctgagctgacgcaggcgcgggtgcgagcggatcgcattcgtgacaataagcccgcctcccggctgcgagtcaggttacgcaaagagaattgggaacaacttagcagtatctgggagcagttttcccgccgttatatgctgcaattcgagcgtagcggcgcttctctggaacaaattgccgccgaggtgctgcgcgatccggcgctgtatattcgccagaagccaagccaggtgcaacaacggctggtatcgaatgaagataatggccgttttgaagtggcgcagcgggaaggcgaattagccgccagcgaatttatggcgggcatgaaatatggccattttcttaagcaactggcgttacgcaccagtctgccggttaacgtcctgcacccggtgttaatggcgatgctgcgtgatgttttgcacggagattcacgctatttaagcgagatctcgttggacaatatgacccgcgcattacagacgcggattaatgcgcattttgcgcagcgccacgattatctgcctctcgattttcaggcttcaacgtcggtatttgattccacggcacggcagttcagagaggagattagcgctgaaattgtggggaaaaatgtggatgagaatgcgatagacgatccccgttctctctatcaaataccgccgttgcgttatgacagcgtcgatccagaattgccgctattaaaatacgattatccgcaacaggtttctgtgtttggcaaactgcctaagcgggccattcagatccccaaatatacggggggctctactacgccggattttgtgtaccgtattgagcgtcaggacgccgacagcgtttatttactggttgaaactaaagcagaaaatatgcgcgtaggcgatcaggttattcttgatgcgcaacgtaaattcttcgatatgctgcgtcggcaaaatatcaatgtcgagtttgcggaagcgaccagcgcgccggcggtattttctacgatcaatggcttgattgaggggaaggcaaactaacgggtttgaatgaaccttaacggttatctttttgatagaccatataaaatggccgccgcgcagcgagcgttgcggtcattctccctgtgctaatcccccgtcccgtaaaccgcgttgacttgaaggttatcgttttacgtctattcttaactttcagctacgcgtattttgctgaaattgcaaatagtcttgaagacgctgtttttttgttttgccgttatttttataacggccaggtagatattgccaagtgaatgtaactaagggagacatgttatgctaaatagatactaccgtttcgctgtcgaaaaagacgacccctccgaagcgccagagtcgggcgataagcctgacagccagccgcaaaaaaaatcgtaatttatctggatattccccgacgtttatacgtttggggaaaataaccgtttcgtttcaacctggttgcgaacagtgaatattttacacgaagtgactatatataaacgggagggaacatggagtttgatgccttctttttagcgagactccagtttgcctttaccgtctcttttcatattattttccccgcgattacgattggcttagccagttacctggtggtactggaaggtttatggctaaaaacgcgtaatcctgtctggcgctcgctctatcagttctggctcaaaatttttgccgtcaacttcgggatgggcgtggtctccggtctggtcatggcttaccagttcggaacgaactggagcggtttttcccagttcgccggcagtatcaccgggcctttattaacctatgaagtgctcaccgcattcttcctggaagcgggattcttaggcgtgatgctttttggctggaacaaagtcgggccgggtctgcatttcttgtctacctgtatggtggcgttgggcacgttaatgtcgacgttctggattctggcgtctaacagctggatgcataccccgcagggatttgaaattcacaacggtcaggtagtcccggtggactggttcgcggtgattttcaacccgtcgttcccgtatcgcctgttgcatatgtccgttgcggcgtttttaagtagcgcgatgtttgtcggcgcgtccgctgcctggcatttactgaaaggtaacgatacgccggctatccgccgtatgttctcgatggcgttatggatggcggtcgtggtggcgcccgttcaggcattgattggcgatatgcatggccttaacaccctgaagcatcagccggtcaaaatcgccgcgattgaggggcactgggaaaatacgcccggcgagccaacgccgcttacgctggtaggctggccggatatggaggcggaacggacccgctatgcgcttgagatcccggcgttgggcagtctgatcctgacgcatagcctggacaaacaggtgcctgcgctaaaagattatcccaaagaggatcgccccaactctaccgtggtgttctggtctttccgtctgatggtgggcatgggcgtactgatgatcttcctggggctggccagcctgtggctacgctaccgacgccgactgtatcattcgcggccctttatgcactttgcgctgtggatggggccgtccgggcttatcgccatccttgccggatgggtgacgacggaagtaggacgccagccgtgggtggtctatggcctgctgcgaacgcgtgatgcggtttccgcgcacagtaccttgcagatgagcatcagtttgctggccttctttgtggtctattccctggtctttggggttggctatatttatatgattcgccttatccagaaagggccgcagccggcggagacaccgaccgctgaaaccgatggcagacccgcgcgtcctatctctgccgtgggagaatcgcttgagcaggagaaacgcgaatgaccatcgatcttccggttatctggtttgctattatcgtgttcgccacgctgatgtatatcgtaatggatgggttcgatctgggcgtcggtatcctgtttccgtttattcgtgataaacacgatcgcgatgttatggtgaactcagtcgcgccggtatgggacgggaacgaaacctggctggtgctgggcggggccgggctttttggcgcgttcccgttggcttatgccgtcatcaccgacgcgctgactatcccgctggtggttatgctgcttggtcttatctttcgcggcgtcgcttttgaattccgttttaaagccaccgagtcgcatcgcgcgttctgggataaatcctttatcgtcgggtcaatcctggcgacctttgcccagggggttgtggtgggcgcggtggtgagcggttttcaggtggaagggcgaacctttagcggttcgcagcttgactggctgacgccgtttaacctgttctgcggcgtcggtctggttgtcacctacgcgctgctgggcgctacctggctgattatgaaaagcgaagatccgctgcatagccggatgtgcgcgctgtcgcgcccgttgttgatcgtcttgttgttggtgatgggaggcgtcagcgtgtggacgccgctcacccacgacgacatcgccgagtgctggttcacgctgcccaatttatactacttcctgccggtgcctgtgctggtgttggcttttagcgtctggctatggcgcagcgtgaaaaaaccagaatcccatgcgcgtccatttattctcacgctagggctgatttttctggggttcagcgggttaggcatcagtatttggccgaatattattccaccggatatttcgctgtatgccgccgccgcgccgccgcaaagtcaaagctttatgctggttggggcgctgataatcatcccgattattctggcttataccttctggagctactacgtcttccgtggaaaagtgcgacatggtgagggatatcactgatggttaaagtgaaaaaatggtcgcggcgagtcgtatggatggtcgcgatatggtgcgccagcgtgcttctgctggcgggcgtcggaatgttattcagactgctcatgacctccgcaggatttcgctcctgactgatacccccggacgcgctttcgtcgctggcgaaagcgcgtttttatcgacagatcggcgtttatcgatcacctttgctcgccttatctctcccctcaatagcggttgataattattctcatctttattgtcgttcccgggccgcagtgatatggttacacagtggctaacgctctggtataacgcagataaacggtattgataatgtctccgatctcctgtcactcttccgccgccccggcgatgaaaaagatcttttccgtcagcgacttcatcgcgtttggcgagcgttatggcattgattaccgcttccctgcgttaccgcagtatacgcagagtagtcccgtacttcatggcgatatcgaagagatagcgcttcccggcgggatttgcattacacgctcggatgttcacgtgttacaaccttatgaaaccacctctcgccatagcagtccgctgtatatgctggtggtgttggaaggtaacgtcgcgctggctgtcaatgagcagacctttttgttgagcgcggggatggcgttttgctcgcaactgagtgagcagcagacgatacgcgcccatcacggcgcagacagtaaattgcgcaccttgtcgctgggaatgtacccggacggcggatggcgggagcgtttgcctgtctcgctggcagacgagtgggaaaatagcgcaacctcggcgagggtctggcaggtgccggagtttctgctttcggggctacgttatgcgcagcagcccggacctcatgcggcgtcacgccagttaatgctggaaggcatcatgctgcaattgctgggctatgcgctaaatctatgtcagccggcaacgcaaaaacgcgggcttcccgtcaccggtgaataccagcggctggagctcattcggcgtttactggagcagacgccggaaaaagcctacacgctgaacgaactggcgcgtcgggcggcaatgagtccaagtagcctgcggtgcaagtttcgccatgcctatgggtgtaccgtgtttgattatctgcgcgattgccgcctggcgcgcgcgcgtcgttatctgatggagggatacagcgtgcagcaggccgcctggatgtcaggctatcaacatgccactaactttgcgacggcattccgtcggcgttatggctgctcgcccggcgagctgcgtgacgcgtctcttacggcgtcccgccactgtgcgtaacgcgccccgccagagcggtaatatccgccgctaacccggttttctgccgctttgggtgattttttatcattgcgcataggcaatctggcgttacgcatagtggtccgtcatctctaaaaggtaataattcttatttacaataaagatgcctttggagatgttcatgtttgcgacaacgcgtatggcgctattgataggcggagctatcggcggcgcgacttttcctctttttgcccaggaaaccacaaaaaatgataccgtcattgtcacctcgcccgttcagagtggcgcgaccaagctggcgacgccagatattgaaacgccgcagtcggtatccattattacccgccagcagtttgaagagcagggcgcaaccagcgtgcgtcaggcggtcagctacaccccaggcgtatacagtaaccagataggcgcctctaaccgctttgattacatcgtattgcgtggtttttcggacggtagtctggataacgtctatctcgacgggttaaaaatgatgggcgacaccaattcgcacagttcgttggtggttgacccctggtttctggaagatatcgaggtggtacgcggcccggcgtccgttctgtatggacgttcatcgccaggcggcattgtcgcgctgacgtcgcgaaaaccggcgtttgatgccggaggagaagtgaagctgtttgccggcaataacaaccagcgcggggcggcttttgatgtgaccggcccactggatgacaatgaacgtgtggcggcgcgtcttagcggcatgacacgttacgccgattcgcagtttacccccttgaaagaggaacgttatgcgctgatgccgagcctgacctggcgaattaccgatcggacgcgtcttgatcttatggcctatctgcaccgtgatccggaaggcggtagccactccggactgccttatcaaggcacggttgtaccttataacggcggaaaaatttctaacactttctttgaaggtgaagatgactacgacaaatacgatcgccgtgaaaatatggtgggttataacattgagcatctgttcgataacggctggtcggtacggcaaaaattgcgctatttgcataccaaagtgacgttgaatcaggtctatgccgcaggttggttgaatgaaacggcgctgaatcgcggctattccggctccggggagaaaatgtcggctatcgcgctggataatcagctcgacggcagcgtggataccggggcgattaatcatcgtctgctggtggggatcgattatcaggatcgcagtaaccatactactggctattatggcgcgtttccgccgattgacgctttcaaccctgtttatggcgctcagccggattacattacgttgtatagccgtgaaaaacataagctgcggcagaccggatactatttacaggatcagatgtcatgggatcgctggcgctttacgttgggcggtcgttacgatcgggtcagcgtgtctaacatcgacaaacttcatgattcacgcagcgatctcgataaaaacaacgtcagtacccgtgctgcgttgctttatctgttcgacaatggcgtcgccccctatctcagttattctaccgcgtttacgccgaccagcttcgccgacgaaaacggcaatgtgctggaaccgatgaaaggcaagcagtgggaggcgggggtaaaatacgaaccgccgggggggaatagccagtttagcgccgccgtgtatcgtattaatcagaccaatatcgcgaccaaagaagaacctaccgatccgtaccgctcgattggtgaaattgagtctaaaggggttgaactggaggccattagccatttgtcggatagcgtccgtttgcaggcggcgtatacctatactgatatccgttataagaaaagtagcccgcaagaacagggtaagcgcgcggtttatgctccacggaaccaggccagcgcctggctaagctacgatgtgaaaagcggtctgttagaggggctgactttgggctccggcatccggtacgtcaacggcgtgaccagcgatcgcctgaatacccacacattgccgtcctatacactggtcgatatggtggtagggtatgatttatccagcattgggttaaatggcttgagcgcccagctcaacgtaaataacctgacggacaaacgctatgtcgctgcctgtaattcgctctcttattgttattttggcgccgagcgtagcattgtaggcagcgtgtcatgggcgttttgataacgcttatcgtccggtagcaaaggctaccggacaaacattagcggtgcgtcacgccttcatagagaagtctgagcgcaaacatcccgataatggcgccgataacacggctggcaatgcgctgtattcgtccataagcgcggcggactgcggggagcgaaaaggcctggctgagaaaaatacgccagataacggatgacagcacaattccggcccaggccattaaccttgcccatgtgggcgtttctgcgctaagcgttacggaaaaaatactgataaaaaacagtacggtttgcggattggataaatcggtcattaatccccggcgaaagaaaattgtccacggggcggcaatcggcgtctggagcgtgctcatttgcggcgtcgcctggtggcgaatactgttccaggcgaaccataataaataggcgccgccgacaattttgataagagaaaataccgcttcgcattgcgtaatgagcgtcgccagaccgaaaagccccagcccggaataaaaggcgtctcccgtggcgacgcccaggccggtgatgactcccgcccggcgtcctgatgcgaggctggtttgcaccaccacaaacagattcgcgccgggattaaaaaaggttaacacaaacagactgacggtaagcacaacggcatgaaacggctccatagacaactcttcccatagcctcaagaaataacgttcatcttattaatagtcaaaccagatgattgcgagtgagatcacaaagcaggggcgttttaatccgcgttgttacgccgacagagcgggggctgactggatttttccagcaatctacactacttatttaatcagtccgaacggcctttttgttctgataaagcgatgatggcgtaataataaaacgagggttttgctatgaaaactggctacaaggttatgcttggcgcattagcgtttgtcgtgacaaacgtttatgccgcagaaatcatgaaaaaaacggactttgataaagtcgcctccgaatacacgaaaattggcacgatttccaccaccggggaaatgtcgccgctggacgccagagaagatttaatcaaaaaggcggatgaaaaaggggcggatgtggtggtgctgacgtccgggcagacagaaaataaaattcatggtacggctgatatttataaaaagaaataaaagcattgcatcataaaaatacccgcctgggtttccggcgggtatatttattcctggcaaccggcatccgttttgccggatgacggcctgcagtaaacgtagcgccatcaggcattcaggacgctgtcatttgtcttaattatccgactggtctttggcaccagcttttaaacgacgccacagagtggtgcggctaatccccagataacgcgccgcggcggtcttatcgcccttaaagcgcgccagtacatcctgtaacgcgttcgcatccacggttgaaggcgtcagttctgctgtgttcaccataagctcaggtaataactgccgcataaattgcctgtccagcgttggcgcgggatcgacgcttaaaaaaagcgccaggcgctccatcatattacgcagttcgcgaatattaccgggccagcgccaggccagcaaaagcggctgacactgtgtcaatccatgacgtatcgattcggtaaacggaatttccatcgccgccagcgactgttttaaaaagctttccgccagcggcaaaatatcagcctgccgctcgcgcaaaggaggaagcgtcagacgcagaatactcaggcgataaaagagatcggggcgaaaacgtccttgcattatctcccgatccagatcgcaatgcgtagcgctgatcacccggacatccaccgggatcggctggtgtccgccgacgcgagtgacggctttttcctccagtacgcgcaaaagtcgggtttgtaacggcaagggcatttcgccgatttcatccagaaacagcgtgccgccgtgtgcgatttcaaacagccccgcccggcctcctcgtcgtgaaccggtaaacgcgccctcttcataaccaaacagttccgcttccagcaacgactcggtaatcgcgccgcaattgacggcgacaaagggaggggatggcttattctgacggtgaggctggcggtgaaagaacgtctggtgaatcgcctgcgccgccagctcttttccggtccctgtttccccctgaatcagcactgccgcacgggagcgggcatagagcgtaatcgtctggcggagctgctccatttgcggcgactggccgcgtatatcgcccagttcataccgggtttgtaatcccttgccggatgggtaatccacgcgctggcgccgtgtcagacgggtcatatccagcgcatcatgaaaagcctgacgaacggtcgccgcggaataaataaagatggcggtcattcctgcctcttccgccagatcggtaattaatcccgcgccgacgacggcctcaataccgttggccttaagttcgttaatttgcccgcgcgcgtcctcttcggtgacatagcttcgctgttcaagacggaggtgaaacgttttctgaaaggcaagtaaagccggaatggtctcctgataggtcacgataccgatagacgaggtgagctttcccgctttcgccagcgcctgtaatacatcgaatccgctgggcttgatgaggatcaccggtattgacaggcggctttttaaataggccccattcgaacccgccgcgataatcgcgtcgcagcgctcggtcgccagttttttgcgaatgtaggtcaccgccttttcaaagccgagttgaataggcgtgatggtcgccagatgatcgaattccaggctgatatcccgaaacagttcgaacagacgcgttacggagaccgtccagatcaccggtttatcgctattatcgcgcggagcgctgtgggcagtcgtcatcgcagtagattcatctttaaggggcgattttttgttttaaacgtgtttcataaatgttgcaatgaaacagggtgattcgtttcatgaaacgttagctgacacgtttttttttcccttaatcgcgcttattcataacagaaatgactgtaattacctgtttttaaatctcattgtatttaattttctcgctgcctctttgcctggcatagcctttgctttggtgaatacatcttgaataacaatttactaacatgaggacgagatatgtctttacattcgccggggcaggcatttcgcgccgcgctcgctaaagagaatccattacaaattgtcggcgctatcaatgccaaccatgctctgttggcccaacgggccgggtatcaggctatctatctttctggcggcggcgtagcggcgggctcgctcggactgccggatctggggatttctacgctggatgatgtgttaaccgatatccggcgcatcacggatgtttgcccgctgccgctgttggtggatgcggatattggctttggctcctccgcctttaatgtcgcgcggacggtaaagtccatagccaaagcgggcgccgccgcgctgcatattgaagaccaggttggcgctaagcgctgtggacaccgtccaaacaaagcgatcgtctcgaaagaggagatggtagaccgaattcgggcggcagtggatgcgcgcaccgatccgaactttgtgatcatggcgcgtaccgatgcgctggcggtggaagggctggaggcggctctcgatcgtgcgcaggcttacgtggacgcgggggctgacatgctgttcccggaggcgatcaccgaactgtcgatgtaccgccggttcgccgacgtggcgcaggtgccgatcctcgccaacatcactgagtttggcgcgacgccgctgtttacgaccgacgagttgcgcagcgcacacgtggcgatggcgctctatccgctgtcggcgtttcgcgccatgaaccgcgccgcagaaaaagtctataccgtgctgcgccaggaagggacgcaaaagaacgtgatcgacatcatgcagacccgcaacgagctgtacgaaagcatcaattactaccagttcgaagagaagctggacgcgctgtacaggaataaaaaatcgtagcctgtaggcctgataaggcgaagccgccatcaggcaatgccggatggcactacgtttaacccgcctacggtacggcctacacgcctcaataccctacacattacaataatgacgaggacaatatgacagacacgacgatcctgcaaaacaacacgcatgtcattaagcctaaaaaatcggtcgcgctttccggcgtacctgccggaaataccgctctgtgtaccgtgggaaaaagcggtaacgatctgcactatcgcggttacgacattctcgatctggcggagcactgcgaatttgaagaagtcgcgcatttactgatccacggaaaattaccgacccgcgacgagctgaacgcgtataaaagcaagttaaaagcgctgcgcggattacccgccaatgtccgtaccgttctggaagcgttaccggcggcctcgcacccgatggacgtgatgcgtaccggcgtctccgcgctgggctgcaccctgccggaaaaagagggacataccgtctccggcgcgcgcgatattgccgataagctgttggcctcgctcagctctatccttctttactggtatcactacagccacaacggcgaacgtattcagccggaaaccgacgatgattccatcggcggccatttcctgcatctgctgcacggtgaaaagccaacccaaagctgggaaaaggcgatgcatatttcgctggtgctgtatgccgagcatgagttcaacgcctcgacgtttaccagccgggtgattgccgggactggctcggatgtctactccgcgattatcggcgcgattggcgcgctgcgcggcccgaaacacggcggggcgaatgaggtgtcgctggaaattcaacagcgttatgaaacgccggacgaggcagaggcggatatccgtaaacgcgtggaaaacaaagaggtggtgattggctttggacatccggtttacaccatcgccgacccgcgccatcaggtgatcaaacgggtggcgaaacagctttcagaagaaggcggctcgctgaagatgtaccacatcgccgaccgtctggaaacggtgatgtgggagaccaaaaagatgttcccgaatctcgactggttttcggcggtctcctacaacatgatgggcgtccctaccgaaatgttcaccccgctgtttgtcatcgcccgcgttaccggctgggcggcgcacattattgaacagcgtcaggacaacaaaattattcgcccctctgccaactataccgggccggaagatcgtccgtttgtctcgatagacgatcgttgctaactcactcttattaaaaataaaacgcaggaaacgtaccctatgtctacccaagaactgaacatccgcccagactttgaccgtgaaatcgttgatatcgttgattacgttatgaattacgagatcacctcaaaggtggcgtacgacaccgcgcattattgcctgctcgacacgctcggttgtggtctggaagcgctggaatacccggcctgtaaaaaattgcttgggccaatcgtgccaggcacggtggtgcccaacggcgcacgcgtgccgggcacccagttccagctcgatccggtacaggcagcttttaacattggcgcgatgatccgctggcttgattttaacgatacctggcttgccgccgagtggggccatccttctgataacctcggcggtattctggcgacggctgactggctgtcacgcaacgccgtcgccgccggcaaagcgccgctgaccatgaaacaggtattgagcgggatgatcaaagcccatgaaattcagggctgcatcgcgctggaaaacgccttcaaccgtgtcggacttgaccatgtgttgctggtgaaagtggcctcgactgcggtggtcgctgaaatgctggggctgacgcgcgatgagatcctcaacgcggtatcgctggcgtgggtggatgggcagtcgctgcgtacctatcgtcatgcgccgaataccggtacgcgcaaatcctgggcggcgggcgatgcgacttcgcgcgcggtacgtctggcgctgatggcgaaaaccggcgagatgggctatccctcggcgctcaccgccaaaacctggggcttctacgacgtttcattcaaaggtgaaacgttccgtttccagcgtccttacggctcctacgtgatggaaaacgtgctattcaaaatttctttcccggcagaattccactcgcaaaccgccgtcgaagcggcgatgacgctgtatgagcagatgcaggccgcgggtaaaacggcagcggatatcgagaaagtgaccatccgcacccacgaagcctgtctccgcattatcgataaaaaaggcccgctcaataacccggcggaccgcgatcactgtatccagtatatggtcgccgtgccgctgctgttcggacggttaaccgcggcggattatgaagacgaggtggcgcaggacaagcgtattgacgccctgcgcgagaagatcgtgtgttatgaggacccggcttttaccgccgactatcacgacccggaaaaacgagctatcggcaatgcgatcaccgtggagtttactgatggatcacgctttggcgaggttgtcgtggagtatccgattggtcatgcgcgtcgccgcgccgacggtattccgaagcttatcgaaaaatttaaaattaacctggcgcgtcagttcccgactcgccagcagcaacgcattctggatgtctccctggacagagcccgcctggagcagatgccggttaacgaatacctcgatttatatgtcatctgagccagccagcagtaaggcgtaagttcaacaggagagcgtgatgtcttttagcgaattttatcagcgttccattaacgaaccggaggcgttctgggccgagcaggcccggcgtatcgactggcgacagccgtttacgcagacgctggatcatagccgtccaccgtttgcccgctggttttgcggcggcaccactaacttatgtcataacgccgtcgaccgctggcgggataaacagccggaggcgctggcgctgattgccgtctcatcagagaccgatgaagagcgcacatttaccttcagccagttgcatgatgaagtcaacattgtggccgccatgttgctgtcgctgggcgtgcagcgtggcgatcgcgtattggtctatatgccgatgattgccgaagcgcagataaccctgctggcctgcgcgcgcattggcgcgatccattcggtggtctttggcggttttgcctcgcacagcgtggcggcgcgcattgacgatgccagaccggcgctgattgtgtcggcggatgccggagcgcggggcggtaaaatcctgccgtataaaaagctgctcgatgacgctattgcgcaggcgcagcatcagccgaaacacgttctgctggtggacagagggctggcgaaaatggcatgggtggatgggcgcgatctggattttgccacgttgcgccagcagcatctcggcgcgagcgtgccggtggcgtggctggaatccaacgaaacctcgtgcattctttacacctccggcactaccggcaaaccgaaaggcgtccagcgcgacgtcggcggttatgcggtggcgctggcaacctcgatggacaccatttttggcggcaaggcgggcggcgtattcttttgcgcatcggatatcggctgggtcgtcggccactcctatatcgtttacgcgccgttgctggcaggcatggcgactattgtttacgaaggactgccgacgtacccggactgcggggtctggtggaaaattgtcgagaaataccaggttaaccggatgttttccgccccgaccgcgattcgcgtgctgaaaaaattcccgacggcgcaaatccgcaatcacgatctctcctcgctggaggcgctttatctggccggtgagccgctggacgagccgacggccagttgggtaacggagacgctgggcgtaccggtcatcgacaattattggcagacggagtccggctggccgatcatggcgctggcccgcgcgctggacgacaggccgtcgcgtctgggaagtcccggcgtgccgatgtacggttataacgtccagctactcaatgaagtcaccggcgaaccttgcggcataaatgaaaaggggatgctggtgatcgaagggccgctgccgccgggctgtattcagactatttggggcgacgatgcgcgttttgtgaagacttactggtcgctgtttaaccgtcaggtttatgccactttcgactggggaatccgcgacgccgaggggtattactttattctgggccgtaccgatgatgtgattaatattgcgggtcatcggctggggacgcgagaaatagaagaaagtatctccagctacccgaacgtagcggaagtggcggtagtggggataaaagacgctctgaaagggcaggtagcggtggcgtttgtcattccgaagcagagcgatacgctggcggatcgcgaggcggcgcgcgacgaggaaaacgcgattatggcgctggtggacaaccagatcggtcactttggtcgtccggcgcatgtctggtttgtttcgcagctccccaaaacgcgttccggaaagatgcttcgccgcacgatccaggcgatctgcgaaggccgggatccgggcgatctgacaaccattgacgatcccgcgtcgttgcagcaaattcgccaggcgatcgaagaatagccgtaagccggataagccgcgttcggcaacgggttagactcagcgactgaatagtggggtgtaaagtcgggaaagggcggcagcgcgccgccctgtaacagaattaacgcagaatatttttctcagccagatccagtgcgaagtagctgaaaatcaaatcggcgccggcgcgtttaatcgagcccagactttccagcacgaccttttcttcatcgatggcgccagccatagcagcaaatttaatcatggcgtattcaccgctcacctggtaagcgccaagcggcaactctgtgcgttcgcggatttcacgcagcacgtccagatacgcgccggccggtttcaccatcaagcaatccgcgccctgggcttcgtcgagcagtgattcgcgaatcgcttcacggcggttcatcggattcatttgatacgtcttgcggtcgccttttaacgcggtacccgctgcttcacggaaagggccgtagaaagaagaggcgaacttggtggagtaggacattattgccgtatcggtaaaaccggcggcatccagcgcctggcggatagcctggacttgtccatccatggccgcggagggcgcaataaaatctgctccagccgccgccgcgataacggcctgcttgccgaggttggccagcgtcgcatcgttatccacaccgtgttcgcacaacacgccgcagtggccgtgcgaggtgtattcgcagaagcaggtgtcggacatgacgatcatctccggcacggtttgcttacagatgcgggacattcttgccaccagaccgtcttctttccaggtatcgctgccggtgtcatcagtatggtgagaaatgccgaaggtcataacggaacgaatgccagcatttgcgatacgttcaatctctcgcgccagctgcttttccgggatacgcattacgccgggcatggcatcaatagctttgtaatcgtcgagttcttcttcaacaaagatcggcaacaccaggtcgttcaggctaagtgttgtctcttcaaacatagcgcgcagcgcagcggatttgcgcaggcggcgagggcgatggataaggtctgtcatggtctgcctgatgtttgtggaatcgaaggcccagtatacctgaatctgcaggcagatgttttacgaaaacggtccttaacgtagcaggcgcagccccggcggcggcggaacatggcgcttcttttatataccgaagattaatacctcaggcactatatcattttaaataagaattagttttacgttgtttttagttttatttcatcgtcatttaagtaaatgtgggttttaacattattcatgtttattttgtttttctttaatctatatttatcttatatgtattttgtttttttattttcttgtaaggtcatgaaaaagaatgcttttcaattataaaacttccttttattacgtctttttaattcatgtccgaatccggactgaggataaagaataattgaaccttttagcaatgacgccgcataatccttcttgctaaacatctgtatgtttttatgcattgataattgatggatcaactatattacgtccctgaggagggatgacaaatgcactcctggaaaaagaaacttgtagtctcacaattagcattggcttgcactctggcaatcacttctcaggcgaatgctactacttacgatacctggacttattacgacaatcctaccaccgcgcttgattggaataatatggatgccgcaggcactgttgatggtaactatgtaaactatagcggtttcgtttactacaacaatgccaatggtgatttcgatcagacgttcaacggtgacactgttaacggtacgatttctacctattatctgaaccatgattataatgacgcaaccagtaatgagctgaatattagtaattcagttattcatggctcgattacttccatgctgccgattggttattacgatcgttttgatacgttggatcacgatgggtattctgaatattatcggttcaacaacggtactgatactgttgacggaaactggtatgacggtgatgtgttcacgctgaacatcgctaattccaccattgatgatgattatgaagcgttttacttcactgattcctataaggatggtgatgtaactaagtacacaaatgaaacattcgatgtcagcgaaggcgtggcggtgaatcttgatgtagaaagcaacatcaatatttccaacaattcccgtgttgcaggtattgccttgtctcagggaaatacttacaacaacacttacacgacggaatcccataactgggataacaatattaatgtatttgactctactgtaacttccggttcagattatatcctggatagtgcttatactactgacactggtacttttggcacaggtcactttggcaattccgatgagccgagcgattatactggtgctggcgacgttgcattatctttcactgatgacaatggtgcttcagactatgcaatgaagaacaatgtgtacttcagtaattctacgctgatgggtgatgtcaaatttaccagtaactggaacgccaatttcgatgctgatggtgatgatactaacggtgatggtgttcctgataccaaccatggctgggctgatgacggcctcaacgtcgacgaactgaaccttacacttgataatggcagtaagtgggttggtcaggcgacttatactgttgatacaacgtcccgtatgtatgatgttgaaacgaacagccttactccaggcgcaacattggaagataatgcctggaatcgtatcgttggtaatgaagttttccagagcggcgtgtttaacgtgacgctgaacaatggttctgaatgggacaccgttggggactcgactgttgatacgctggctgtaaacaatggttctcaggttaatgtttctaattctgatttaacatcagacaccattgatttgactaatggttcttcactgaacattggtgaaggtggttatgttgacaccgatcacctgacaattgactcctatagtactgttggtttgaccgaatctactggctggagtacttactcaaacctgtatgctaataccatcaccgtaactaacggtggtgtgttggatgtgaatgttggtcagtttgataccgaagtattcagcactgataaactggaactgaccagcggcaatactgctgatcacaacggtaatgttgtttctggtgtgttcaatatccatagcagcgattatgttctgaacgctgacctggtgaacgaccgtacctgggataccactcaggctaactatggttacggtactatcgcaatgaactctgacggtcacctgaccatcaacggtaatggcgatatcaacaacggcgacgaactggataacagctctgttgacaacgttgtagcggctaccggtaactataaagttcgcatcgacaacgctactggtgccggttctgttgcggattacaaaggcaacgagctgatttatgtcaatgacgtaaacaccgacgcaaccttctctgcagcaaacaaagctgacctgggtgcttacacctatcaggctaagcaggaaggcaacactgtcgtgctggaacagatggaactgaccgactacgctaacatggcgctgagcattccttctgcgaacaccaatatctggaacctggaacaagacaccgttggtactcgtctgaccaacgctcgtcatggcctggcggataacggcggcgcatgggtaagctacttcggcggtaacttcaacggcgacaacggcaccattaactacgatcaggatgttaatggcatcatggtcggtgttgataccaaagttgacggtaacaacgctaagtggatcgttggtgcggcagcaggtttcgcgaaaggcgatctgagcgatcgtaccggtcaggtggatcaggacagccagtctgcctacatctactcttccgctcgtttcgcaaacaacatctttgttgacggtaacttgagctactctcacttcaacaacgatttgtctgctaacatgagcgacggtacttacgttgacggcaacacatcttctgacgcctggggcttcggcttgaaactgggttatgatctgaagctgggtgatgcaggctacgtaacgccttacggcagcgtatccggtctgttccagtctggcgacgactaccagctgagcaatgacatgaaagttgacggtcagtcttacgacagcatgcgttatgaactcggtgtagatgcaggttataccttcacttacagcgaagatcaggcgctgaccccgtacttcaaactggcttacgtttacgacgactccaacaacgatgctgacgtaaacggcgactctatcgacaacggcgtagaaggttctgcggtacgtgttggtctgggtactcagttcagcttcacgaagaacttcagcgcctacaccgatgctaactacctcggcggcggtgatgttgatcaagactggtctgcaaacgttggtgttaaatatacctggtaatcattttctctcaggagaaataaaggtaatttaaactgaaaaatgcccgtcaaggacttgacgggcattattgcaaggaatgcatatgttatctttaagcaagccactacaggaattctacagactcgataaatgcctttctaagcatggtacgcgtttcgagtttgttaacgataaagagattatctgttcacctgatgaaagtaatacccatacctttgttattttagagggggttgtttcgttagttcggggtgataaagttcttattggtattgtgcaggccccttttatttttggcttagccgatggcgtggcgaaaaaagaggcacaatataaattaattgcggagagcggttgcatcggttatcgcctctcatcatcacaaactctcgccatcattgagcagaaccaactgtggcgtgaagccttctgttggatagtatggaaaagtcaggtactggaacttcgtgacaagcagctcattggtaataattcttacgaccaaattcgtgcgacgttaatgacaatgattgagtgggatgaagaacttcgctcacgtattggtgttatgaattatattcatcaacgaacgcgcgtatcgcgatcggtggtggcggaagttctcgcggccctgcgtaagggtaattacattgaaatgaataaaggcaaactgatcagtattaaccgtttgccctccgaatattaacaaaaatgttgcgcctcgtctgatatagcgcgaggcgcgacgactcaggatgcaggaatagcaatcggtttattgccgcttagctcagtaaccaaatcgttaatcccgtcgctcatattggtaaaacgagtgaggggggaacgggttaccaccacaaaagcgccaatattatattgcgggatcatcgccatataggtaataaaaccgccgccgcctcctgttttctggataatgccaggacgtccgtcttttggcgccatatagacccaacccagaccgagcgcgtcggctttacccggtacgtccatcccgatgattttctttaactgtatgcgctgataaatcaacgtttgcatacgatcggcctgttggctacggtgatagaaatctgacgacagatactgttgcatccagcgcatcatatctcctggcgtagaatagaccccaccgctgccaatggctgccagcgtattattacaggggcttgcgcctttttctgccaccatcagacgcttacactgatcgggagaaggggtaaacgtggtgtctttcattcccagcgggcgggtaatcttttcttcaaacagttgcgtataaggtttgccggaggcggtcgccagcgcgtcggctaacaggtcgaacgccagattggaataggccgcctgtgaaccgggcgcgacttttaacgttgctgtggagagccagttccagcgttgttcgcgggttggccagacaaataccggacgatgcgccgcgccgccgggctgttctcgcggaagcgcgctggtgtgggtcgctaagttgaccaacgtaatcggcgtgccttgatacgtcgggacacgcgcgccgggaggcgcatatttgctgagaggatcgtttaattttaccgttccctgatcgagcaattttaccaacatttcactggtcatgagcttggtgagagaagcgatacgaatgaccgaatcaagctgtggacgaacattattgcccggtctggtgtcaccgaaactacgaaacacgcgttgattgccgtcgatcaccaccagcgccatgcccgtggcgccgctaccataaaagatatgctcggcataacgatcaacgatatcagaggcaaaaaccggatcggcaatcggctgagccgcctggacagaagtaagtgatgccgcaaacagcatggcagtaaaaagcagactacgtttcaacggtgatgtccataagtgaaataacggtggttatgcgtatttatactacccggcggcacattgcaaaacgttaaagagaaaaaagtgggtgaaaaaacgtaacggcgggttttcgtgatggagaatgtttacttttgtgatagagcgcttgtgataacctgatagcgtcagcgtgcctgctgtgtatgaaactcgtcgaaacaattctgttgagcagaaatgcgaactaagcgtcacaacgtaggtcacaatgcctggtttagccctttcatttgcgtgggcatggcgtgctattgccgccgtcacagcagccgtaataaagataagaagttagcaggagagcatgatgtttaaatcttttttcccaaagccagggccgtttttcatgtcggcgtttgtttgggcgctgatcgccgtcattttctggcaggcgggaggaggagattgggtggcgcgacttgtaggggcatccgatgaagtgcctatcagcgcagcgcgcttctggtcgctggactatctgattttttatgcttattacctgatttgcgtgggattatttgcaacgttctggttcatctatagcccgcaccgctggcagtactggtcgatacttggcacctcgctcattatttttgtcacctggtttttggtggaggttggcgtcgcggttaacgcctggtacgcgccgttctatgatttgattcaaacggcgctcagctcgccgcacaaggtcactcttggtcaattttatcatgaagtgggggtgtttctcggtattgcgcttatcgccgtggtgatcggtgtgctgaacaacttctttgtcagccactatgtatttcgctggcgtaccgcaatgaatgagcactatatggcgcactggcagtacctacgccatatcgaaggggccgcccagcgtgtgcaggaagataccatgcgttttgcctctacactggagaatatgggcgtgagttttatcaatgccatcatgacgctcatcgcctttctgccggtgttagtcaccctgtcagcgcatgtgccgaatttacccatcgtagggcatatcccttacggcctggtcattgccgccatagtctggtcattaatggggacgggcctgctggcggtcgtcgggatcaaattgccagggctggaatttaaaaatcagcgagtggaagccgcttatcgtaaggagctggtctacggtgaagatgacgccagccgcgccacgccgcccaccgtccgtgaactgtttagcgcggtgcgccataactactttcgtctctactttcactatatgtatttcaacatcgcgcgcattctctatttgcaggtcgataacgttttcggtttgttcctgctgtttccttccattgttgccggtacgattacgctggggctgatgacgcaaatcaccaacgtgtttggccaggtgcgcggttcgttccagtatttgattaactcctggacgacgctggtggagctgatgtctatttataaacgtttacgtagctttgaacgccagttggatggtcagccagttcaggaagtgacccactcttttagctaacagaaggaaacgttatgtcggcggcgtcccgtctttatcctctgccttttctggcggttgccatattggctggctgtagtagtcaatccgggcagccggtgagcaagggcgagaagcctgtcgacgtggcaagcgtagtacgtcagaaaatgccagccagtgtcaaagacagagaggcctgggcgaaagatatcgcgacaacgtttaagagccaggggctggcgccgacggtagaaaatatctgttcggtgctggctgtcgcccagcaggagtccggttatcaggcggatcctgtcgtgccggggctaagtaaaatcgcctggcaggagattgatcgccgcgctgaacgactacacatcccgctgtttctggtgcacaccgcgctgaaaattaactcccccaacggcaagagctatagcgaacgcctggacacggtaaaaaccgaaaaacagcttagcgctatttttgacgattttatcaatatggtccctatggggcagacgctatttggctcatataacccggtgcatacgggcggcccgatgcaggtcagcattgcctttgccgaacagcacgcgaaaggctatccgtggaagatgacgggtacggtacgtcaggaggtctttacgcgccgtggcgggttgtggtttggaacctaccatttgctgaattacccggcgaactacagcgcgcctgttttccgcttcgccgacttcaacgcgggatggtacgccagccgtaacgctgcgttccagaatgccgtcagtaaagccagtggggtaaaactggcgctggatggcgatctgattcgttataacagcaaggaaccgggcaaaacagagttagcggtacgcaaactggcagggcagttgggaatgagtgagcgtgaaattcgcagccaactggagaaaggcgatagcctggcgtttgaaaaaacggcgctctacaagaaagtctataaactggccgaggccaaaacgggcaagacgcttgcgcgggaaatgttgcccggtattcaactggaaagtccgaagatcacacgcaagctgacgaccgcctggtttgctaaacgagttgatgagcggcgggcgcggtgtatggggcgataaatttcgcgctgggatactttctccagcgcgctaaggtttattggtgacggtgacgccagcgtaaaaacgcggcgataacggcgaaaatgaggcagcccgtgaggaagggcaccaggccaaaaatcgtcccgacgcccagcccaatctctacccgcggtcgacctgtatcctgtacctgcatcagatgctcatagatgcccggcgcatgaaccagcaggtttaagagttgcgctccggcccagaagcaaaacagtacaaatatggcgtaagcaatatttccgggcgtagaggaggtttctcgatgcttcccgctgaacagcgattttgagagagtgaaatcagccataaagacctccaggatgatcggctacgatctggcgttatgccatcggcttactgtgaagtctgacaggtcattgtgtttgtcaatatcagaatcatggtaatttcacatacggaatgtatccatcgcgtaaatttttgttagttgtcacaaaacgatcacttttatcaaaatcaattaacatttaagaaattccgtatcccccacagactcgctcgccagaagtatgcaaaaatacgtttttgttactgttaatacgtcggagtcgttatgcgtttgcctgtaaaaattcgtcgtgactggcactactatgccttctctattggccttatctttattttgaatggcgtcgtaggattgctgggttttgaggctaaaggatggcaaacctatggcgttgggctggtaacatggattattagcttctggctggcggggttcattattcgccggcgcgaagaggatgaggtaaaagacgcccgataaacgttgcgctatcgggcgtgcgctattacatcgtggtttttaaggcgttattcgccgtatggcgttccagcgccagctcaatcagacggctgatcaaatcggtatagcccagtccgctcgcctgccagagttttggatacatactgatattggtaaaacctggcagcgtattgatctcgttaatcacgacctcattgtctgccgttaagaagacatcgacacgcgccatacccgcgcatcccagcgtctgataagcctggatcgcgatcgcgcggatcttgtcattcacctcggaagggatctgcgcaggcacgacaacttgtgcgccattatcatcaatatacttagtatcgtaggcgtaaaattcgctgttcagtacgatttcgccgcaggtactggcctgtgggttatcgttacctaatacggcgcattcgatctcgcgccctttgatcccttgctccaccaccactttatgatcgaattcgaaagccagcgcgaccgcctgctgatattgcgcttcgttagcgactttactgacgccgaccgaagagccctgattggcgggcttaacgaacagcggcagtcccagacgggattcaacctcggcaaaactaaacgcgtgacgattcgttcgggtgagtgtaataaacggggcgatattcagtccggcatcgcgtagcagtcgtttggcgacgtctttatccatgcaggctgcggagctcagcacgtctgaaccgacaaacggtaagtttgcgacgcgcagcatcccctgcaatgagccgtcttcgcccagcgtaccgtggacgataggaaaaataacatctaccgtcggtagcggctgcccgttctgagcgttaatcaattggtgttggtgtttgccaggcacctgggccagactgattgccgaaggacgtagcgcgatatgtgccggatcgtctgcattctgcaaataattttccgcatcgttaacatgccattgtcccgccttatctatccctaacagcaccacgtcgaagcgggttttatcgatcgcatcaacgatatttttcgctgattgcaaagacacttcatgttccgccgacttaccgccaaatactattcctacccgcaatttcgccatcttaaaaacccattccatcgaatgcaaagcgtatacattaccacgacaaaacgcgggtttcgcgggcttctgccataatgtttatgggatgtgagaacggaggccgcgtgagaggtaagggttttctgattattgtgctgttgggcggcattggcgggctgggatatcgttatcttccctcttattataatccttttgctccgctacaacttgccgatccgccaggctggatcactaccttcaaactacagcgcctgacgccgtcgcagtgccgggagcttttgacggcggccaatcaacagggattaatttcatcacaacctgttgcggatagcgctggtgaatgtcccttatcccatgttgtgcgcgtcagagattttggccaggtaaaactgagcagcagttttttagcctcctgcccgttggcgctgcgctccgcgctgtttgtcgaacagcaggcaaaacctttaacagaaacgtggatgaagcgccgcctgacccgtatcgaacatctgggcagctatgcctgccgtaatatttatcaccgcccggatgcgcgtcgcagtgaacatgccagcgcagaagcgctggatgtcagcgggtttcagctatcggatggccgaaaaatcactgtcctgcgcggctgggggcgtcaggagacggggccctggttacgcgctatgttaaacgccagttgccattattatggcaatgggctcgggcctgactataacgctgcgcatgctaaccattttcatcttggaatgcggggctacggcgtgtgtcgttaaagcataaacgtctgccttgcgcggctatataatgtgacatgtttcacaaaaatgatgaacggggagacaaaatagcaaagtgtgacgtatcgcacctctggaaccaccaggaaaaagagaacttgctaagctaacgcgtattttcagctacttaccgttacgagtcttatggaatcctggaaagttaatctaatttccgtttggtttggatgtttttttaccgggctggcaatcagccaaatcctgccattcttacccctttatatttcccagcttggcgtctcttcccatgaagcgttatcaatgtggtccgggttaacgtttagcatcacgtttcttatttccgccattgtgtcgccgatgtggggcagtctcgccgatcgtaaagggcgtaaactgatgctattgcgcgcgtcgctcgggatggcgatagctattctactgcaggcatttgcgacccatgtctggcaacttttcctgctgcgcggaatcatggggttaacgtcaggctatatccccaatgccatggcgctggtagcctctcaggtaccacgcgaacgtagcggctgggcgctcagtacgctttctaccgcgcagatcagcggcgttatcggcgggccgttaatgggcggctttgtcgcggatcatatcgggctgcgggcggtatttctgattaccgccatgctgttggtggtgagctttctggtcacgctatttttaattaaagaaggcgtgcgtccggtcatcaagaaaagcgaacgcctgagcggtaaagccgtttttgcgtcgttaccttatcctgcgctggtgatcagtttgttttttaccacgatggtcattcaactctgtaatggttccatcagtccaatcctggcgctgtttatcaaatcaatgatgccggacagtaataacatcgcctttcttagcgggttaattgcctcggtgcccggtatctctgcgcttatctccgcgcctcgcctgggaaaacttggcgacagaatcggcacggaaagaattctgatggccacgcttatctgcgcagtgctgcttttcttcgcgatgtcctgggtcaccacgccgttccagctggggctgttacgtttcttgttaggctttgccgatggcgcgatgttacccgccgtacaaacgttattggtgaaatactccagcgatcaaattaccggacgtatttttggctacaaccagtcatttatgtacctgggcaacgtggttgggccgttgatgggcgcgacggtatcggcgatggccggtttccgctgggtttttatcgctacggcggcgatcgtgttgatcaatatcgggcaactgaccctggcgttacgtcgtcggcgtaacgcgcaaaaagcgaaaggccaatagcggtgcatcgtaacggcgcttctgccgttacgatatggtttaaattaaaagatatattctttatccgtgaagtttttctatagatggcataaccttaaattatgatatagcgtgattattgttttttgatggtttattatcgtctcgttttcggtctgagaaacgtttcgctgcggcgacagtgataattatttgtgtaaagttcttcctgtatcataaaaatagtactttcagcctctaggcagtggttcttcatagtgataacgtcaccctggaactaataaggaaatatggtcatgaaaaatctcatagcagagttgttgcttaagctagcccaaaaagaagaagagtcgaaagaactggttgctcaggtagaagcgttagagattatcgtcacagcaatgttacgtaacatggcgcaaaacgagcaggagatgttgatacgtcaggtagagggggcacttgaaggcgtaaagccggatgccagcgttcctgatcacgatacggaattgctgcgccaatatgtaaaaaagttgctgagacacccccggcactaatcgtatttaaaacaacacagttgttataacgttacttttatgaaataacatagccgcttcgtttttattttcttctgggtaatacagagcaaaataaaaacgaagcggctatggtaataacagtgtaacgttatgcgctgttcttctgcatcctgccagtgtaactgtggataatcgaattgcacattagcctacggtttgtcaatcaataaaacatctattgctaacggtaagtaatacttttacagccgggtggtatttttgccagtaacagccagacttatataaagtccctgggatatttcccaaagggacaacgtgtaatgtgtacactgacaaaaggatggtgctatgaaaataacattactggtgactttactttttggcctagtctttttaaccgccgtcggcgcaaccgagaaaccgttaacgccgcaacagcagcgcatgacgacctgtaatcagcaggcgacagcgcaagcgttgaaaggcgatgcgcgtaaaacctaccttagcgactgcctgaaaaacagtcagtcagcccctggcgagaaaagcctgacgccgcaacagcagaaaatgcgtgaatgcaatgttcaggcgacggaacaatcactgaaaggcgatgaccgtagcaagtttatgagcgcctgcctgaaaaaagcggcgtagtgctatcgggtgagtcctgaaaaacactcacccgaaatttcatacttcctccatgcgctctgtttctataatttgggaaaattgtttctaaatgttcccaaaaataatgaatgatgaaaatttttaccgaaaagcggttgaacaggcggtagcgccgcctgaccctcctgatgatcgtcagcgctccgggttgcgcttcgcccggcgcatcaggctaccgcgtgcggtggggttaggggggatgtttttaccggtggccgccgtgttagtgacgcaacctgtctttggcggctggtggctattgctggtcggctggtcttttgtctggccgcatctggcatggcagtgggcggcgaaagcccttgatccgctacgccaggaaatttacaacctgaaagtggatgcgatcctctccggcatgtggatcgcgctgatgggcgtcaatatgttgcctgccgccgcgctgtttatgatgatgagcatgaatctgatgggcgctggcgggcggcggctattcactgtcggaatgggccttttgctggcgtcatgtctggtgacgttgcagcttgccgggctacccgtcgcgatgcgaagctcgtcgctggaagtcacgctctctttgcccgtcattatgttgtatccgcttctgttcgcctgggtaagttaccaaacggccattaaattagcggaacataagcgacgcttgcaggcgatgagctcgcgggatggcatgaccggcgtctataaccgacgccactgggaaattttattacgtaatgaattcgatcacagccgacgccaccatcgggaggcgacattgttgattatcgatatcgatcattttaagagcattaacgacacctggggacatgatgttggggatgaggctattatcgccctgacgcgtcaattacagataacgctacgcgggagtgatattatcgggcgctttggcggcgacgaatttgcggtgattatgtgcggaacgccggcagacagcgcgattaccgccatgtcgcgagtgcatgaacggctaaataccttacgcttgccgggcgcgccgcaggtcatgttacgtatcagcgtgggcgtggcgccgttaacgccacaaatcggtcattatcgggaatggctaaagtctgcggatatggcgctttacaaagcaaagaatgccggacgtaaccgcaccgaagtggcggcatgacgtccagccgggcttcaggatttactgagcgcctctgatttttccatacacttcgtcatcgcttctattaccgcagcgcggaagccacgttcttccagaacgcgtacggcttcaatcgtcgttccgccaggcgagcacaccatatctttcagttcgccgggatgctttccggtttcgagtaccattttcgccgaccccatgacggcctgcgcggcgaatttataagcctgagcgcgaggcataccgcccagaacggcagcgtccgccatcgcctcgataaacataaagacataggccggcgaagatccgctcacgccaaccaccggatggatcatcggctcagcaatcacttccgccccgccaaagcagcggaaaatattcagcacatcagccgtatcttccggtgtgaccagcgcgttgggcgtgacggaggtcattcctgcgttgaccagcgacggcgtattcggcatagcgcgaatgattttacggtcgtgtcccagcgcgcgcgcaagctgatcaagcgttacgcctgcggcgatagagaccaccagcgagtctttgttcaggctggaggagatttcactgagcactttcaccataatgcccggttttaccgcgccgaaaacgatatccgcgacctgagtgacctcctgcgcgctttgcgccgcattaatgccgtactgatcatgcagggcggcgactttatcgggggagggggtatagacccagatctggccgggaagtacctgaccgctggcaatcagtccgccaagaatagccttgcccatattaccgcagccaataaaaccgattttcttctccatctcgtcactccctatgtttgtgtgttatggggaatggttagcttaacgcggattgaaaacgggcagaaggagaaacagcactttgatgaaagacaaaagcgcgagacaataaaagattgtataccgtacgggagacattatgaccatctgggtggatgcggatgcgtgtccgaatgtcattaaagaaattttgtaccgcgccgccgagcggatgcagttgccgcttattctggttgccaatcaggccttgcgcgtgccgccttcgcgttttatccgcacgcttcgcgtggccgccgggtttgacgtggcggataacgaaatcgtgcgtcaatgcgaagcgggcgatctggtgattaccgcggatattccgctggcggctgaagtgctggaaaaaggcgctgcggctcttaatccccggggagaacgctatagcgacgccacgattcgcgaacgtctgacgatgcgtgactttatggacacgctacgcgccagcggcgtacaaacgggggggccaaacactctctcgccgcgcgatcgtcagcattttgccgccgagctggataagtggtggctggaaagccagcgtaaaaaataaatcatgtaatgaaaaatttacagtttattcatttctgattcttgctatagtactaatattgtgactttagtacctttgtgtaaattattatttacatttatgcgttgtactagttagatgatatgattataacattgctgatatcaaatcctgcgtatgcgcagttcctgggggaacgcctgctatgatgcaacctctttatcttgttggcccgcggggctgtgggaaaaccaccatcggtatggcgctggcgcaggcaaccggttttcggtttgcagataccgaccgctggctgcaatcgcacgtgcagatgagcgtcgctgatatcgttgaaaaagaaggctggggagggttccgcgcccgggaaaccgcggccctggaggcggtaagcgcgccttcgactgtcgtggcgacgggaggcggtattattctcacggagtataaccgacgttatatgcaccgtgttggcgtagtgatttatctgtgcgcgccggtatccacgctggttaaccggcttgaggctgaacctgaagcggatctgcgcccgaccctcaccggcaagccgttgagcgaagaggttcgggaagtgcttgagcagcgtgacgcgttgtatcgcgaaacggcgcattacattattgacgcgacgaaagcgccggcccaggtcgtttctgaaattattgcggcgctgccgccgtcgacgcaacggttacagggagatgtctatacttaacgctcacccagaataaaggaaacgctatgccaaccagaccaccttatccgcgggaagcttatatcgtcaccattgaaaaaggcacgccgggccagacggtgacgtggtatcagctacgggctgaccatccgaaacctgattcgctcaccagcgagcatccgaccgcagaagaagcgatggatgcgaaaaatcgttacgaagatccggataaatcatagacgcatgaaccactcggaagggattctgagtacccctaaattgtatctccatcacattcttgaaacatttatactggcaactaaaaccgtaaattaagcgataacaatacaatattggagttatttggaatctttacacaatacgttgctcatctgctgctacgctttctgagatttgtagggcaggtagcgcggtgagcgtgtgaatatttgcccgggaattacgacgaagtaataaggtggaataaaaatgagtgcgtcgttggcaatcctcacaatcggcgttgtgccaatgagcgaagtgttaccgcttctgacggaatacatcgacgaacaacacatcacccatcatagcctgctgggaaaaatgagccgggaagacgttatggcggattacgctgtagagcctggcgacgatccgcttttgacgttgctgaatgataaccagatagcccatgtttcccgccagaaagtggagcgagatttacagagcgttgtcgaggtgctggataatcagggttacgatgtcattatactgatgagcaccgcggcgattaaaagtatggcagcccgtaattctattttgcttgaaccgctgcgtattattccaccgcttgtcgcctctattgtggatggacatcaggtgggcgtgattgtgcctgttgcagaacttctggcggcccaggagaaaaaatggcaggtattgcaaatgccgccggtgtattcgctggcgaatccggttcacggttctgagcaacagttaattgatgccggacaggcgctactggatcaaggcgcggacgtcattatgctggattgtctgggttttcatcagcgtcatcgggatattttacagcaggcgctggatgtgccggttttactctctaacgttttgattgcgcggttagcttcagaactgcttgtctaattttacgtgacaggccgaacgtcaggactctatattgggtgttaatttaataatgagacggggcctgattatgctacaaagcaatgaatacttttccgggaaagttaagtctattggatttaccagcagtagcaccggccgggccagcgttggtgtgatggcggaaggggagtatacatttggcaccgccgaacccgaagagatgacggttgtgagcggcgcgttgaaggtactgttgccgggaactgtcgaatggaaagtgtatacagccggtgaggtgtttaacgtgcctggccacagcgagtttcatctccaggttgctgagcccgcctcgtatctgtgccgctatttgtaacggtgagtcccctctccggcggagaggggccctctggttagcgctgcgcttcgccgcctaatccttccaccaggctttgaatcagcgccgccagctcgccggtcatcaggataaagtccgcgtcaaaacgttgggcaaaatcttcccggtcgatatcttcgttctggtcgcgcagctcatcgcagaatttcagacgcttaatggagccgtcatcgcacatgacgaattgaatgcgctgctgccagtcgagcgccagcttcgtgaccactttacccgcttcaatatgaacggcgatctcgtcgctgaccagatcctgctttttcgcgcggatcacgccgccatcttccagcatcgctttcaattcggcttcgtccagcaactggaaaccctgagcgaccgtaccggagcgcacccactcggtgagcgtcagctcaatcggattttccagcgccagcgggacgaccggcagcgagccaagacttttacgcagtagcgccaaagtatcttccgcttttttcgcgctggcgcagtcaaccataatcaggccgttaacggtatcaatccacatcattgtctgactgaagcggctaaacgcgcgcggcagcaacgaatgcaacacttcatccttcagggaatctttttccgtcttcttcagcttgcgtccctgatcggcttccagtttctggattttcgcctccagtgcctgtttgatcactggcgatggcaggattttctcttctttgcgcgcgcaaataataatttggccattggcggtgtgcgttaacgcatcgctgtgagagcccatcggcggaacccagcccattttggccatatcctggctaccgcatggggtaaacgtcattgaggcgagctgtttctccatctcttcggcgcgtaatgtaatatcgcggctaagacggtaaaccattaaatttttgaaccacagcatgataatttccacggccttgtcgttaaatccaggcggtatagtaacgaattgtcggcaggcttgcattgccaatcagaacggtgaattctaccctgttgatattcccaaaaaatgaggagcggtatgtgcgtattggtatcgatttaggcggcacaaaaacggaagtcattgcgcttgatgatgcaggagagcagcggtttcgccatcgtctgcctacgccgcgggaggattatcagcaaacgatagaaaccatcgctacgctggtcgacatggcggaacaggcgaccggccagaccggtagcgtcggcattggcattcccggttctctctcgccttacaccggcgtggtgaaaaacgctaactctacgtggcttaacggccagccgttcgatagcgatgtgagccgtcgtctgaagcgtgaagtgcggttagccaacgatgccaattgcctggcggtatcagaggcggtggatggcgcggcggcgggggcgcaaacggtatttgcggtgattatcggtaccgggtgtggcgcgggcgtagcgctaaatggccgggcgcacatcggcggcaacggtacggcaggtgaatggggccacaatccgttgccgtggatggatgacgatgagttgcgttaccgcgaagaaattccctgttattgcggtaaacaaggctgtatcgaaacctttatttccggtacgggatttgccacggattaccagcgtttgagcggtaacgcgctaaaaggcgatgagattattcgtctggtcgacgcgcaggacgccgtggcggaactggcgttaagccgttatgagctgcggctggcgaaagcattatctcatgtcgtgaatattctggatccggatgtcattgtgctgggcggcggtatgagcaatgttgagcgcctgtacaagacggttccgtcgctgatgaaatcgtttgtttttggcggcgagtgcgagacgccggtacgtaaggcgcggcatggcgattcgagcggcgtgcgcggcgcggcctggctgtggccgctggcgtaacgttgttagccggatggcgcgtcatccggcaaccggcgtgaccgatggctgcttgtgttttagacgtccgtataccagcaacgacgacatggcggaaaacgagagcagggcggcgggaagcgccacatagtggtacgcaaaacctagtgtcagcatcagcccgccgcaccaggcgccaatcgcgctaccgagattaaacgcgatttgccctcccgccgcgcccagcagttcgccgcctttggcgttttgcagtagcaggatttgcagcggcgcagagagcgcaaacagaccagcgcagcagataaacgcgaaagtcagcgatgtcgttttgtatccgctgaagaaaaagagcgccatgagagaaagcacgataacgaggtcagtcactaccgcgatgcgcagcggagtatatctgccggagagtttgccgcttaacagattgcctaacaccatccccagcccgaccagcatcataataaacgtcatgctcgtctccgaaaaaccggagatgtacatcataaatggcttgatatagctgaaccaggcaaaaacgcccgcattgccgaacatcgtggcggcgaaaatgagccacggcgaggggctacgcaagaagtgaaactgctcgcgcaggctgccttgggctttgtcgcgaatatccggcacccagaagaaaattgcggtgagcacggcgatgttgaaaaccgcgatcaataaaaaggtgtagcgccagctaaattcctggctcaggtaagtgccgaacggaatgcccaccagattcgccaccgtcatccctgaaaccatacccgcgacggcggcggtgaccttcccggggcggataatctttgacaagacaatggcgccgacgccaaaaaaggcaccgtgcggaaagccggaaaccagtctgccgacggcgagcatcagatatgacgaggaaaaggtaaatatggcattgcccatcacgcacaacatgaccagaaacaacagtatatgtttaagcgaaaagcggctggaaaagagcgccataacaggcgcgcccagcacgacgccgaaggcgtaaaacgagatcatatgcccggcggcgggaattgttatcccgacatcgcgtgccagctccgtcagcacgcccataatgccaaactcggccatccccagtccgaacgtacccagcgccaaagaaaaaataacttttttcataccacctgccgaaaataaaggcgcatgttgcgcgctgtggctgtgaattgtcacagccaatcaacgtatagcttgcggataagcgcgaggtaataccattccttatccgtctttgtgtattcattattatgctatgtcatgacggtatgctgtgcgcaggatgacactcgtgttactccacggcaaacgctttgtccagtttgctataaccaagcccattgatttttttcacttttatctgcacagggatacgttctttcatggcttccacgtgactaatcacaccgatggtcttcccgctggcattcagcgcatcgagcgcatccagcgcggcgtccagcgtttcgctatcaagcgtgccgaagccttcgtcgaggaacaaagaatcaatgcgcgttttatggctgaccaaatctgataacgccagcgccagcgccaggctgaccaggaaactttcgccgcctgataacgttcgcgtatcgcgcacggcgtcggcctgccaggtatcgacaacctccagttccagcgcgtcgctggctttgcgctgcaataaatagcggccatgcaggcgggtgagttgatgattcgccagccagaccagattatccagcgtcagtccctgggcgaatttgcggaacttatcaccttctttagagccgatcagcgcattgagatagccccagtcttccacttgctgagaggcttgcttcatttccgtcatcagcgcgcgttggcgctgccgattatctgcatcctgtttaatttgctggcggatttccccctggcgtgtcgtgttctcgcgcagttgttgcgccaactgcgtcagccgctgcgcgagctgctccgccgtacacgttgggtccagacctgcgggcggctgttgctgatggtcagccagcgcctgcgcggactgcgcgcttaacgccttcgcttgttgtagctgactttccagcgtttgttgttgtttttccagacgggtcacggtctcttcatccagcaacgccgccaggaacgttgcctggctgtcaaacgggctattttttaacgccgcatcaaagtgcgctatcgcctcggcggcgcgctgctgctcctgcgtcgtttgttcctgcagggtttgcaactggctttgtaatgacacgcactcatcatgcgcctgccgccagttatccagcggcacgtcgtcgtcggaatccgcggtatccgtttgcggtagcgtctccagcaacggggcaagcctgtcgatctgcatttgcaaatccgcgaactctgtctgacgctgttgccatattttcgcttcgtcggcgcgctcattcagccacgaagcctcgtcttctggcgcaggaagggaaagcgtatactgcgccaaatctgccgtcagcgacgcctgacgctgcgcaatctgcgcggtaaagcgcgctacctgttcagtatgcgccgcgatttgcgtttgtagagcatgacgctggctgagctgatccaactgttgctcatgctcttccgcggcggtcagccagcccgcgaggtcttcttgcggctggagctgaacgcccagcgtagcgcacagcgtttgccattcctcagtaagcgcttgctcctcctgcaacaacgactgcgcctcgctttcatcccgctgtaattgttgcgttaaggcatctaactgtcctcgcagcgccgcgccttcttccgccagcgttttgacctctttttccagcgcgtcgcggcgggtttgattcgcgctcagttccagcgcctgataggcggcgatggcggggtgcgtcgtcgagccgcaaagcggacacggctggccggactgtaagtgcgcccgctggctttccagatctttgatgcgcgcctcctgctcgcaaatagtgcgaacgtccgcaagctcctgcgctttagtcttataactcaaacgcttatccgccagacgttgggtgtattgcgcctgctcctgatgatgacgcgcgatagctgcctgtagctgcgcctgacgcttttgtttcgggagaatttgcccctgaagcgcggcgagacgatggcgtagcggacgctgccgggtatgcaatgctctggcttccgccagcgcctgtggcgtgaggtcgagcgtgagcggcggtagcgcatcacgctgacgcgtatcgctcagcaactgctgttgccattggctcagttgcgcccgatcgtgggattgttgtgttaataatgctcgccaccccgccagttcgctgcgccagacgcggatgccgtcgtgttccgccagccatgtcttcaaccgctgccctgtggcgttcagttgcgtgaattgtcgatgcgcgcaggcgcggatacgctggcgcaggcgatacgcgctttgtaagcgagcattcacttcatcactgtgctggcgaacacgctcaacggcgcgggtttgttcctgaatgcgctcccagtgcgggcgcaactggcgagcaggttgcgccagtgtcaacgccgcgagctgcggctgcgctttttctcgcgcctcttgcgccgcgtacagcgcctgctgccgggcgtgtaattcagtgtggagctcgttttttcgggtcagccagtgaaggtgctgctgctgtccctgctggtcggccagcaggcgtttctcttcgtcagtaagcgcctgcaaactggcttccagttgctgtaactgttcgtccgccaatagggcgacgccgctggcctgcgcttgtaacttttccagttcgagacgggctgatttatgtttttcaaatacctgtgcggagatctgcccgtaaatctcagtgccggtgagctcctccagaagctctgcgcgctctttcgctttggcgttaagaaaggcggcgaactgcccctgtgataacaacatcgaacgggtgaagcgcccgtagtccagcccggtcaacgtggcgatcatctccagtttatcctttaccttatcggcaaagatctttccgtctgaacaccgtgccagctctacgcgtggggcctggagattgccgtcaggctgatttcgggctcggttctggctccagaacgcgcgccaggcttcgccttttacctcaaactccacttcggccagacattccgctgtatcgcgcgtcatcaaatcgttttgcgattgcgataccgtattcaggcgcggcgtttcgtggtacagcgccaggcagatggcgtcaagcaaggtggtttttcccgcgccggtcgggccggtaatggcgaataacccgttactggcaaacggttcggcggtaaagtcgaccttccattctcctttcagcgagttcaggtttttcagacgcaaactgagaattttcatgcctcatgctcctcattcaacgcgtagagcgtgctggaaaagagctgattcaggcgctcgcgctgcgggggatctaacgcttccagcgccagacgccgcgcaaaaacctcctccacgctaagctcgcttaatgtttcccgccgctcgttcgccagcgagcgctcgcgctgttcgcggctacggcgcaccagtaatacctctacggggagtgactccgttaatgtctgtattctgcgttggatatcgtgcagataatcatcggtggtgatttcaatatccagccagacggggggcgattgctcaacgccgcgccactgctcaagctgttcggtaattgacgccaggtcgccttttaaaaccgccagcggttgagtcacggggacagccagactttcggtactttgccatttcccctgctcgaaggtcaccagatgcacgcatttgcttttgccgcactcatcaaagctgagggcgatgggtgagccgcaatagcggatatgctccgtgccgccgacacattgcgcgcggtgaatgtgtcccaatgcgatataatccgcgggggggaaatgctgcgccggaaaggcatccagcgtaccgatataaatgtcgcgaaccgcatcgcttttgctggcgccgacggtggttaaatgtcccgtcgcgataaccggcagctttcgttcgccgcgtagttggcacgcttcctgatactgctgttgataataatcggcaatcgcatgaagaagttgctgctgtttctcgctgccggataatcccgcctgactggtaataatgtcgcgcgggcgcaaaaagggaatggggcacagtacggcgcccggagacccgtcgcgacgatgaagtagccgcggcgcatagcccgcgctggcgatcacggttgtattgagaaacgccagaatgtcgcgcgattcgtttagcgtggcgacggaatcatgattaccggccagcaccaccagatgacagcccgtttgctgtaaattaacgacgaaacggttataaagttctcgggcatagcttggaggcgaaccggtatcaaaaatatcgccagcgacaataatggcatccacctgatgggcctgcgcggtctccagcagccagtccagaaaagcctgatgctccgcggcgcggcttttactgtagaaattttgtcccagatgccagtcagaggtgtggaggatgcgcataattgttccatgcaaaaaaagcgtgaacgggattatacacgtcatcccttccatttttgggcgcaatttaccgccggtacacggtaatgcatggtttcaccggtgtcataaatcatcaacatgctgtcaatgccgcctttttttttcataaatctgtcataaatctgacgcataatggcgcggcattgataactaacgactaacagggcaaattatggcgagacgtattctggtcgtagaagatgaggcgccgatccgtgaaatggtgtgcttcgtgctcgaacaaaatggctttcagcccgtagaagccgaagattatgacagtgcggtgaataaacttaatgaaccctggccggatctcatccttcttgactggatgttgcccggcgggtcagggttacagtttattaaacatctcaaacgtgaagccatgacccgggatattcctgtggttatgctgaccgcaagaggtgaggaagaagatcgtgtgcgcgggctggaaaccggcgctgacgattacattaccaagccgttttcccccaaggagttggtggcgcgcattaaagccgttatgcggcgcatctcgccgatggcggtcgaagaggtgatcgagatgcagggactgagccttgatcccggctctcaccgcgtgatgaccggcgacagcccgctggatatggggccgaccgaatttaaattactccatttctttatgacgcacccggaacgggtttacagtcgcgagcagctactcaatcatgtctggggcaccaatgtgtacgttgaagaccggacggtcgacgtgcatattcgccgtttgcgtaaggcgctggagcacagcggccacgaccggatggtgcaaacggtacgcgggacagggtatcgtttttcgacccgcttttaatgccttttccgccagtagaacacaggtttctggcggagaaggctttccattcttgagggagtatgacgcgtgctggaacggctgtcatggaaaaggctggtgctggagctggtgctctgttgcatccccgcgcttatccttagcgctttttttggttatctgccgtggtttttactggcggcggtgacgggactgcttgtctggcatttctggaatttgttacgcctctcctggtggctttgggtcgacagaagtatgacgccgccgccgggacggggaagttgggaaccgctgttatacggtttacaccagatgcagttgcgaaataagaagcgtcgccgcgagctggggaacctgattaaacgttttcgcagtggcgcggagtcgctgcctgatgccgtggtactgaccacagaagagggcggcattttttggtgtaacggtttggcgcaacagatactggggctacgctggccggatgacaacgggcagaatattctcaatctactgcgttatccggagtttacccagtatttaaaaacgcgtgatttcacccgtccgcttcatttggtgctcaataccgggcggcacctggagatccgcgtcatgccttataccgataaacaactcctgatggtggcgcgcgatgtgacgcaaatgcatcagcttgaaggcgccagacgtaactttttcgccaacgttagccatgagttgcgtacgcccttgacggtattgcaaggctatctggaaatgatgcaggaacaggcgctggaaggggcgacgcgagagaaagcgctgcatacgatgcgcgagcaaacgtatcgtatggaagggctggtaaaacaactgcttacgctgtctaaaattgaggcggccccggcgctgttattaaatgaaaaagtggatgtaccgatgatgctgcgggtcgtggagcgtgaagcgcagacgctcagccagcagaaacatacctttacgtttgaggtcgacgatagtcttagcgttctgggcaacgaagagcagctacgtagcgcgatctcaaacctggtgtataacgcggtaaaccatacgccggcgggaacgcatattacggtgagctggcgacgtgtcgcgcatggcgctgagttttgcattcaagataacggtccggggattgctgccgagcatattcctcgtctgaccgaacgcttctaccgtgtcgataaagcgcgttcgcggcaaacgggcggcagcggcctgggattggcgattgtgaaacatgcgttgaatcaccatgaaagccgccttgaaatcgacagttcgcctggcaaaggaacgcgatttagctttgtgctgccggaacgtttaattgccaaaaatagcgattaattgcctttcgtaagtataactttccataagccagcggatgctggcttattttctttgcagttaagacgggctcgttgaaacattcaacgtttggtggttttttgttcgcatgattagccataactttttcatgagaatggtgttttattctggttgtaaatttcatatcgctatattcatctggtttttagatcccatcttgctttaaaacgttataagcgtttaaattgcgcttcaggtgctgtcattacgactgcatttgcgcggtaaatcgaaaaacaattcttcgccgcatcggtccgggagcttttcccgctgaaattgataaaaaacgccgctttataatcctccgggaaaggcaaaaattttaatgtttacaacatcaccatccacaggcagtaagactttatgacccatcagttaaaatcgcgcgatatcatcgccctgggctttatgacatttgcgctgttcgttggcgcaggcaatattatctttcctcctatggtcggtttgcaggcgggtgaacacgtctggacagccgctattggctttctgattaccgccgtagggctaccggttcttactgttgtggcgctggcgaaagtcggcggcggcgtagacagcctcagtacgccgattggtaaagtggcgggactcctgctggcgaccgtttgctatctggccgtcgggccgttatttgcgacgccgcgtaccgcgacggtgtcgtttgaggtcggtatcgctccgttgactggcgattctgcaatgccgttgctgatttacagcgtggtctatttcgctatcgttattctggtttccctctatccgggtaagctgctggatacggtagggaatttcctggcgccgttgaaaattattgcgctggtcatcctgtccgtcgcggctatcgtttggcctgccggtccaatcagcaacgccctggacgcttatcagaatgcggccttttctaacggatttgtgaacggctatctgacgatggatacgctgggcgcgatggtgtttggtatcgttattgtgaacgcggcgcgttctcgcggcgtgaccgaagcgcgcctgttgacgcgttacacggtctgggccggcctgatggcgggcgtggggctgacgctgctttaccttgccttgttccgcttaggttctgacagcgcgacgctggtcgatcagtcagcgaacggcgcggcgattcttcatgcctacgttcagcatacctttggcggcgcgggaagcttcctgctggcggcgctgatctttatcgcgtgtctggtgacggcggtggggctgacctgcgcctgcgctgagtttttcgcgcagtatattccgctgtcttaccgcacgctggtctttattctcggcggcttctctatggtggtgtcaaacctcggactgagccatctgattcaaatctccattccggtgctgacggctatctatccgccgtgtatcgcactggttgtattaagttttacccgctcatggtggcataattccacccgtatcatcgcgccggccatgtttatcagtctgctttttggtatccttgacggcatcaaagcatctgccttcggcgatatgctgccagcctggagtcagcgtttgccgctggcggaacagggactggcttggttgatgccaacggtggtgatggtgatcctggcgattatctgggatcgcgcggcgggtcggcaggtgacctccagcgctcactaaaatcgctgacatatgtgtacaccacggggcttaacgccccgtggttttttattgtgttgataggtcagaaattgatggaaagcaataataagctaaagcgtgggctgagcacccggcacattcgctttatggcattaggttcggcaatcggcaccggcctgttttacggctcggcggacgccatcaaaatggcggggccgagcgtgctgttggcctatattattggcggggtcgcggcatatatcattatgcgcgcattgggggaaatgtccgttcacaaccctgccgccagctcattttcgcgctatgcgcaggaaaacctcggcccgcttgcgggctacattaccggctggacctactgttttgagatcctgatcgtcgccattgccgacgtgaccgcgttcggcatttacatgggagtctggttccccgccgtgccgcactggatttgggtacttagcgtggtgctgatcatttgcgccatcaacctgatgagcgtcaaggtgttcggcgagctggagttttggttctccttcttcaaagtcgccaccattattatcatgattgtcgcgggtatcggcatcattgtgtggggaattggcaacggcgggcagccgaccggcattcataacctgtggagcaacggcggcttcttcagcaatggctggttgggaatgatcatgtcgctgcaaatggtgatgttcgcttacggcgggattgagattatcggtatcaccgccggggaagcgaaagacccggagaaatccattccgcgcgccattaactcagtaccgatgcgtatcctggtattttatgtcggcacgctgttcgtcattatgtctatctatccgtggaatcaggtcggcacaaacggcagtccatttgtgctgacgttccagcatatggggattacctttgccgccagcattctgaactttgtggtattgaccgcctcgctttccgctatcaactccgatgtgtttggcgtaggccgtatgctgcatggtatggcggagcaggggagcgcgccgaaagtctttgctaaaacgtcacgccgtggtattccgtgggtcactgtgctggtgatgacgattgcgctgctgtttgcggtttacctgaactacatcatgccggaaaacgtcttcctggtgattgcttcgctggcgacgtttgcgacggtatgggtatggattatgatcctgctgtcgcaaatcgccttccgtcgtcgtttaccgccggaagaggtaaaagcgctgaaatttaaggtgccgggcggtgtcgtaacgacgatagcgggtctgattttcctggtcttcattattgcgcttatcggctaccatccggatacccgcatctcactgtatgtgggcttcgcctggatagttctgctgttgattggctggatatttaaacgccgtcgcgaccgtcaattggcgcaggcgtagtcgtttttctctgccttatccggtctgcaggcaacggtagaccggataagcggagccgcttctcctcctggagcctcctcccctaataaacccctggatgatgagttatcctttaaatctctgtggcaaggtggccccattttcagtagaggggatacgagatgttgaatgcctggcacttaccggttgccccatttgtgaagcaacataacgataaattaaccattacgctgtggctgagcggagaaaatccgccgtctcgcgtgacgttgcgctcagaattcgataatgaagaaatctcactggcgatgcgcaaacagcgccgccagccgcagccgggcgtgacggcgtggcgagcgacgctcaatatcgcgttagggcaaccccgtcgccgttacagctttaaattgctttggcatgaccgccagctttggtttacgccacagggatttagccgttttccgcctgcgcgtctggaacaatttgcggttgatgtgccggatagcggcccgcagtgggtcgccgatcaaattttttatcagatcttcccggatcgttttgcccgcagccagtctcgtgaagccgggcaggaccgggtgtactaccatcatgccgcaggtcaggagattgtgctgcgcgactgggacgatcctttaaccccccaggcgggcggttccaccttttacggcggctgtctgaatggcatttgtgagaagctgccgtatctgaaaaaactgggcgtcacagcgctatatctgaatccggtatttaccgcgccgagcgtccataagtacgatacggaagattatcgccatgtcgatccgcaatttggcggcgatcgggcgctgctacgcctgcggcgtaaaacccaggtgcagggcatgaggctggtgctggatggcgtgtttaatcatagcggcgactcgcatgtgtggtttgacaggcataaccgcagcactggcggcgcgtgccatcacccggactcgccgtggcgcgactggtactccttttcaccacaaggcgtggcgctggactggctgggttatccgagcctgccgaaactcgattatcaatcagaaacgctggtcgatgagatctatcgcggtgaggacagtatcgttcgtcactggctaaaggctccgtggaatatggacggctggcggctggatgtcgtacatatgctgggcgaggcgggcggggcgcgtcataatttgcagcacgtcgccggtattacccgggcggcaaaagaggcgcagcccgaagcctatattgtgggggaacatttcggcgatgcgcggcagtggctacaggccgatgcggaagatgccgccatgaattatcgcggcttcaccttcccgctatggggatttctcgccaatactgatatcgcttacgaaccacagcatattgatgcccggacctgtatcgcgtggatggataactaccgcgccgggctgtcacatcagcaacaactgcgcatgtttaatcaactcgacagccatgatactgcgcgctttaaaactctgctgggtaaagacgcggcgcgcctgccgctggcggtggtctggctgtttacctggcccggcgtgccatgtatttattacggcgatgaagtcggcgtggacggcgcaaatgaccccatgtgccgcaaaccgttcccatgggatgaacgcaagcaggacggcaacttgctggcgctgtaccagcgtatggcgaaactgcgccagagcagtctggcgctgcgtcgtggcggatgccaggcgctgtatgccgaaggtgacgtagtggtattcgtgcgagtttatcagcagcagcgggcgctggtggcgattaaccggggcgaggcctgtgaagtggcgctggaagcgttgccgttgctgaacgtggccggatggcaatgtaaaacgggaagcggtgatatccgcgagggaagacttagtttacccgcgatttccgcgacggtatggatgaatcgttgaggcgaggtggttcgtaacaccttacgcataaaaaaggctcgcattcgcgagccttttatcaatgcactgacttacaggctggaaatgttctcagccaggtatttagccacgccgtccggagaggcgttcatgccttctttgcctttttcccactgcgccgggcagacatcaccgtgctcttcgtggaactgcagcgcgtcgaccatacgcagcatttcgtcgatattacgacccagcggcagatcgtttacgacctggtggcgaacaataccgttagcgtcaatcaggaaagagccgcgcagcgcaacgccttcgtccgggtgttcgataccgtaagctttctgaatttcacgcttcacgtcggcgaccattgcgtatttcaccgggccaatgccgcctttatcgacaggggtgttacgccatgcgttgtgaacgaactcagagtcgaaagaaacgccgaccacttcaacgccgcgcttctggaattcttcataacgtttatcaaaggcgatcagctcagacgggcaaacaaaagtgaagtccatcggccagaagaacagaacggtcgttttaccattggtgtgctgtttgaagttgaatttatcaacaatctcaccgctacccagtaccgccgcagcggtgaaatccggggcctgacgagtaaccagtaccataataattctcctgcaatattaagggttttagaacgcaacgcgggcagtatagggagggcgaagcgacaaaacaatgcggtcttgacaatcaatgagacagcttttgcctatcgatcgggtcattataaatcgtaatgatgacccttttatgacagcgaacgatctttctgccaacggcggatctgacgcacgccctcgctatcaggccgtcacagcgctttgcgggcggcctgtgccatcatacgcggataaaaatgccagaagcgctcttctaacgcgtcgtagtgcgcgtccagatcgtaccaggaatcacgcaaggcatccagccggggacggcgattcgccatgccattcagcacgttttgaatgaaatccatatcgcgataccgctctaaccatttttctgaccaaagataatcattcaggttgacaaagcgcggcggggagtcgggcagaatcgtcgcgacctgcgcatgggcgtagccgacaaacgcctgaagtggaaaatcgggagagatttgcgtccagtgacgcgataaaaaatgatcccacatgacgtccagcgtaatgggcgccacgcgccgcgtttcatggcggaaccactctcgcgcctcacgaacttccggcaggttgtcggtcatgacgtcaatacgccgatgcatataaataccctctaccacgtcaggaggataatgcgttgccgggttaccgcggacaaaatcggccagaagattaccggaaagcgagctgtcggcaaggtgcgccagatgcaggtgagcaagaaaattcattattgattctctgtccaaaaagcgggtaacggttgcagcgggaacgccccggcactagactacccgcctcttattttagtctgagtcagagtcatgcgcgttaccgatttttcctttgaactacctgaatccctgattgcccactacccacagccggaacgcagtcgctgccgtttgctgtcattagaggggccgacgggcgcgctgacgcacggtactttcaccgatctgctcgataagctcaaccctggcgatttgctggtcttcaataatacccgcgtgatcccggcgcggctctttggccgtaaagccagcggcggcaagatagaagtgctggtcgaacgtatgctcgatgataaacgcatcctggcgcatattcgcgcttctaaagcgccaaaaccgggtacggaactgctgctgggcgacgacgaaagtattcacgcgaccatgaccgcgcgtcacggcgctctgtttgaagttgagtttaatgacccgcgtccggtgctggatattcttaacgccatcggccatatgccgttgccgccgtatatcgaccgtccggacgaggacgccgaccgcgaactgtaccagacggtctacagtgaaaaaccgggcgccgtcgccgcgccgaccgcggggctgcactttgatgagccgctgctggcggcgcttcgtgagaaaggtgtcgaaatggcgtttgttacgctacacgtaggcgcgggcactttccagccggtgcgtgtcgataccattgaagatcacatcatgcactccgaatatgctgaggtgccgcaagaggtggtcgacgcggtgctggcggcgaaagcgcgcggcaaccgcgtgattgctgtcggcaccacctcggtacgctcgctggaaagcgcggcgcaggcggcaaaaagcgatttgatagagccgttcttcggcgatacgcaaatctttatttatccaggttatcaatacaaagtgattgatgcgctgatcaccaacttccatctgccggaatcgacgttgattatgctggtttccgcatttgccggttatcaacacaccatgaatgcctataagactgcggtagaacaaaaatatcgcttttttagctacggggacgcgatgtttatcacgtacaatccgcaggctatttctgagcgtccgtaagaaggctatctcacttgccattttgacgccgggcagtgctcgccatcctcacgtactgcgtgtacgctccggtggctgtgcgctggtcgaccccaaactggctgcgccgatgacgtcttcgggaatttattagctatggaatcattccgtagcgagtcgttaaacgtcggactgtttttctgacgcaggagtgataatgaaatttgagttagataccaccgatggtcgtgcgcgtcgcggtcgtctggtgtttgatcgtggcgtagtggaaacgccagcctttatgcctgtgggtacttacggtaccgtgaaaggcatgacgccggaagaagtggaagcgaccggcgcgcagattattctcggcaacactttccacctgtggctgcgcccgggtcaggaaatcatgaagctgcatggcgatctgcacgattttatgcagtggaaagggccgattctcaccgattccggcggcttccaggtcttcagcctcggcgatattcgtaagattaccgagcaaggcgtgcacttccgtaacccgatcaacggcgatccgattttcctcgatccggaaaagtcgatggagatccagtacgatctcggttccgatatcgtgatgatctttgatgaatgtacgccgtacccggcagactgggactatgctaaacgctcgatggagatgtcgttgcgttgggcgaagcgtagccgcgaccgttttgatagccttggcaataagaatgcgctttttggcatcattcagggcagcgtttacgaagatttacgcgatatctcggtgaaaggtctggtagagattggctttgatggctacgctgtcggcggtttggctgtcggtgagccgaaagcagatatgcaccgcattctggagcacgtttgcccgcagatcccggctgacaaaccgcgttacctgatgggcgtgggtaaaccggaagatctggtggaaggggtgcgtcgcggtattgatatgtttgactgtgtcatgccaacgcgaaatgcccgtaatggtcatctgtttgtgaccgacggcgtggtgaagattcgtaatgcaaagcataaaagcgacaccagcccgcttgacgccgagtgcgattgctacacctgtcgcaattattcacgcgcttacttgcatcatctcgaccgttgcaacgaaatattaggtgcgcgtctcaataccattcataacttgcgttactaccagcgtttgatggcgggtttacgcaaggctattgaagagggtaaattagagagcttcgtaaccgagttttaccaacgtcaggggcgacccgttccacctttgaacgttgattaattttaataatgagggaatttgaatgagcttttttatttctgatgcggtagcggcaacaggtgctccagcgcagggcagcccgatgtctctgattttaatgctggtggtgtttggtctgattttctatttcatgatcctgcgcccgcagcagaagcgcaccaaagagcacaaaaagctgatggactccattgcgaaaggtgatgaagttctgacgaatggcggtctggtcggtcgagtgaccaaagtagcggaagccggctacattgccatcgcgctgaatgacaccacggaagtggttatcaaacgtgacttcgtagctgccgttctgccgaaaggcaccatgaaggcgctgtaatatttcgttttcccaaagggaactgccgtgttaaaccgttatcctttgtggaagtacatcatgctggtcgtcgtgattatcgtcggcctgctttacgcacttcccaacctgtatggtgaggatccggctgttcaaatcactggcgtgcgcggcgtcgccgccagtgagcaaacgctgatccaggtccagaaaacgttacaagaagaaaaaattcccgctaagtctgtggcactggaagagggcgctattcttgcgcgcttcgacaccaccgatacccagctacgcgcccgtgaagcgctgatgagcgtgctgggggataaatatgtcgtggcgcttaaccttgcgccggctacgccgcgctggttggcggctattcacgccgatccgatgaagctcggtcttgatctgcgcggcggcgttcacttcctgatggaagtggatatggataccgcgttaggtaaactccaggaacaaaatatcgatagcctgcgcagcgatctgcgtgaaaaaggcattccttataccaccgttcgtaaagaaaataattatgggttgagcatcacgttccgtgacagcaaagcgcgtgatgaggcgatcgcctatctgacgccgcgtcatcgtgacctggtgatttccagccagagcggtaatcaacttcgcgcggtaatgaccgatgcgcgcctgagcgaagcgcgtgaatacgccgttcagcagaacattaatattctgcgtaaccgtgttaaccaactgggcgtcgcggagcctgtcgtacaacgccagggcgcagaccgtattgtggttgagctgccgggtatccaggataccgctcgcgcgaaagaaattctcggcgcgaccgcgacgctggaattccgtctggtgaataccaacgttgaccaggccgccgctgctgccgggcgcgtaccgggtgattccgaagtgaaacagacccgcgaaggtcagccggtggtattgtacaaacgcgtgatcctcaccggcgaccatatcaccgactcgacgtccagccaggatgaatataaccaaccgcaggttaacatctcgctggatagcgcaggcggcaatatcatgtctaacttcactaaggacaatatcggcaaaccgatggcgaccctgtttgtggagtataaagacagcggtaagaaagacgctaacggtcgcgccgtactggtgaaacaggaagaagtgattaacattgccaacatccagtcccggctgggtaacagcttccgtattaccggtatcagcaacccgaacgaagcgcgtcagctctcgttgttgctgcgtgcgggcgccctgattgcgccgattcagatcgttgaagagcgcaccattggcccgactctgggtatgcagaacatcaagcagggcctggaagcctgtctggccggtctggtggtctccatcctgttcatgatcttcttctataagaagtttggtctgattgcgaccagcgcgttagtggctaacctggtgttgattgtcggtatcatgtcgctgttgccgggggcaacgctcagtatgccggggattgcgggtatcgtgttaacccttgcggtggcggtcgacgccaacgttctgattaacgaacgtatcaaagaagagttgagtaatggccgcacggtacagcaggcgataaacgaaggctatgccggcgcgttcagttccatcttcgatgcgaacatcacgacgctgattaaagtcatcattctgtatgctgtcggtaccggggcaattaaagggttcgcgattacgaccggtatcggtgtggcgacgtcgatgtttaccgcgattatcggtacgcgtgctatcgtaaacctgctatatggcggcaagcgcgtcactaagctgtcaatctgaggagtgcgatgtggcacaggaatacactgttgaacaactaaaccacggccgtaaagtctatgactttatgcgctgggacttctgggcattcggcatctccgggctgttgctgatcgcggccattgtcattatgggcgtacgcgggtttaactgggggctggatttcaccggtggtacggtaattgaaatcacgctggaaaaaccggctgaaatggacgtgatgcgcgaagcgctgcaaaaagcgggctatgaagagccgcagttgcagaactttggcagcagtcacgacattatggtgcgtatgccgccaaccgaaggtgaaaccggcggtcaggtactgggtagcaaagtggtgacgatcattaatgaagccaccaaccagaatgcggccgtgaagcgtattgaattcgtggggccaagcgtgggcgccgatctggcgcaaaccggcgctatggcgctgctggtggcgttgatctctatcctcgtttatgtcggtttccgctttgagtggcgactggcggcaggggtggtcatcgcgctggcgcacgacgtgatcattacgctggggatactgtcgcttttccatatcgagattgacctgaccattgtggcatcgttgatgtcggtgatcggttactcgctgaatgacagtatcgtggtctctgaccgtattcgtgaaaacttccgcaaaatccgtcgcgggacgccttacgaaatctttaacgtgtcgctgacccagacgctacaccgtacgttgattacctccggtacgacgttagtggtaattctgatgctgtacctcttcggcggtccggtactggaaggcttctcgctgacgatgctgatcggtgtctctattggtacggcatcttctatctatgtcgcatcggcgctggcgctgaaactcggtatgaagcgcgagcatatgctgcagcagaaagtcgaaaaagaaggggcggatcagccgtccattctgccgtaaacacgtatttaagtgttatctgaatcccggtcatgcgatcgggatttttttatttatgtaccatgacgataaacattactgacagtatgctgtcaggagccctgtcatacactcctcatgaatttacccacactcgcaggaggatgtatgaaaaacttgattaactggtttgaaattccagttactgatatggcgcgtgcaatcgccttttatgagcaagtgatgcagatatcgttacgtcgggaaaccatggatggggcggacctggccgtattcccgtatgctgaacccggacccggcggagcgctgataaagcaggatgatgtcgctccagttgcgcagggagtcgttatttatctgcataccgccgatttgttagcctcgattgaacgtgtcgtccttgccggtggcaagtgtgttctggaacccatggttcccggagatgacattggaaccatcgcgttgtttattgacagcgaaggcaaccgaataggtttacatcaacctgcgtgatatttgctaaatgtagagagtcaatatgaccagacgcgctgaccgtttgtttcagatcgtgcaaattttgcggggtagacgactgacgacggcagcgctgttggcacagcggcttgcggtttctgaacggacgatttatcgcgatattcgcgatctgtcgttatccggtgtgcctgtcgaaggtgaagcggggagcggataccgtttaatggcaggttttgatctgccacccttgatgcttacccatcgtgaatcggaagcactgatggtggctatacggttattgaaaacctggggcggcgattcgctatcacgcgagcttgaatccgcccaggaaaaagtgttggccattttgccggaagagagccgccgtaaagcggagcagacacggatttacgctccggatttgggtacatctccacattcgcgcagcgcgtttgatcttatccatcaggccgtttcggcgcagcaggtgttggcgctacattatcgtgatgaagcggggcatctctcttcgcgggatatacaaccgctgggattgtttttctggggagagcactggctgctggttgcctggtgtgagagacgggaagactatcggtgttttcgcctcgatcgctgtttacaaattactccgcttaaccggcgatttcgtgaaacaatcgaccgttctttgcgtgattttttgcgaaaagtcgagcacgaaaaaatgccgtaagatgtgatagcgatacctctaacgcttgtaaaacgggttgattggtcatcagtttgcctgaaatagccttgcttacctggatatataagttgcacagaatcattgctaaaagcccggcttcgcgggaaactgggcataaccctttgtattattcaggtacctgttaattatggctatcatcccaaaaaactacgcgcgcctggaaagcggctatcgtgaaaaagcgctgaagctgtttccgtgggtgtgcggacgttgttcccgtgagtttgtgtattcaaatctgcgtgagctgacggtgcatcatatcgatcatgaccacaccaataacccggaagacggcagcaactgggagctattgtgcctctactgccacgatcatgagcattctaaatataccgaagccgatcagtacggttcgacggtcattgccggggaagatgcgcaaaaagatgtcggcgaggcgacttataacccgtttgccgatctgaaagcgatgatgaacaaaaagaaataagcagactgctgacaaagctgttggtgctgttgaatgttaggttacgcttcgctccacccaacggaatccgcaatataaatgaattattggttttcgtaggtcggatgcaatctggcattttttcagccccggagtttgtcgccagccccaaatgtcctgtaacgcatacattgtcactggaatcccgatcgcaaggttgggatttttttgtttttaagtcctgccgatactggcgagcagagtagaatcagcggtaagccggggcaacccggtgaggcgcaatgttgcgggggcttgatccccggtggccttgtcgctggaaagagaaaacccccgcacattgttcggtattcaccggcaacattacgggggctaacttgactccagacaagttgaggatagccgcgaaccgttgccattgcaacaaaggcggcaatatgacgctcacagagttgagcattactatctggcacgatctggcggcaccaacgctggtcgggattgcgacaggtctgtttttaggctggtggcatcgccggaagtaatgtgaagtgggcgcgactcgccgccgcatggcagcatgcgcccgaaacgggccagaggacgacctctggccttttttgcaggtttagaagttgtaacccacgaccaggtagccgccccagccggtagatttcgcgctgaaatcgccgtcgccccagttcagttttgcgccattctgccactgtccgccgttatggaagtaacgcgcaacgaccgagtagtgccagtgatcgtagttcagcgccaggatatggctggaagcgatggagttgctggtacggttcggatcgtcgcctaaatcagatccccagtcaaagttggtaaagccgatatagctcagtttaccgccccacagatcggtgatggggacgaagtatttcactttgaaacggtagccgtcccattcgttttcattggacgcgccgtagttttgccactgatatttcgcatacacgttcagcgacagacccatcggcaggccggtgtcgatatcggtccccagacccatataccacgtgctctggcggctggctttgttatcgcccatatcgtagatgtagttgttggcgaaataccactctttaaacgggccgaagctcaggtctgcgccggtcagcttatcaattgagaaacgcggttcgatttccatgaacagcggagaaccgtcggaccagatacctttatcgttgccgttaccccaatcaaaggttttgggaatatcgatatagccgtagaaatcaaaccagtcttttttggcaaatgcttcatattccagatagacgtcgttgttcaatttcggcgagaaacgggtatggtagctgcctaccacgtttacgctctggtgccaccagtcggacaaatactgcggctgatcattttctgctgcgttagcagtaaaagatgaggtgagcgccagcgctgcgctgactgcgagtaaagtttttttcatatgtatgccactgtttgaaatcccttgcgggagtgaaaagaacgcaatttgcgtttctaaatatttcgtgtttctgcggagcctattataaaaatcattgctcacaaaaatatgtcttgtttcacatatctatcatttacgtaatcgattgcgttcacgtttgcgcattttagacgcggcgacagtactatctttcatgaatattaccaatccatgtcataaatgacggaaatgtcagtagggcaacaaaagtcgcgcgggggatgttgcggaacgcacaaaacgctccgccagaacgtttattgattaacaggctgaatatcatggatgcgaatgaagcctaactgcgccggtgtgatccccttcaacggtaacgaaatattgacatcactgggcgccagcaagctggctggggcatttaccagaaggctctgtgcattcacctcctgatagttctccgtagtgccctgaagttgcccgtactctacggtagcgctgaatgccggcagtggatcgcgggactcgccctgaatgtgtaacgttgcgtgagcgccgtctgcgacaggcgtaatttccagcaatgtcatacgtagcgtaccgatctggctctccagccgggcaggcgtattggcgccaggcaacaaatagacgccgcgggttgactccgcattcagcttattttgttgggtaatttttaccgtttcctgattcagttgggtcatctctttattcagggtgctaatgctttgatgcatctggcgaacttcgctctgcggcgcgcaggcggtcaggctcaagagacttcccaccaggagaattcttaggtaacgtcttgtcatgtcgatcatttccttcatggttcgatagcgtaatggtagtgcgctatacgcacaaaggcaccgatcctttatctcaaaagcgctccgcctttgttgtcgcgccagttcagggtaaaataacatttcctaaatcatctggtcaggacgccgtatgcattgcccattttgtttcgccgtagataccaaagtcattgactctcgtcttgtaggcgagggctcgtccgtgcgccgccgtcggcagtgcctggtgtgtaatgaacgctttacgaccttcgaagtggctgaactggtcatgccgcgcgtgataaaaagcaacgatgtgcgcgaaccctttaatgaggataagctgcgtagcggcatgttgagagcgctggaaaaaagacccgtcagcgcagatgatgttgaaatggcattgaaccatattaagtcacaattacgtgccactggggagcgtgaagttcccagcaagatgattggcaacctggtcatggagcagctgaaaaaactcgataaagtcgcgtatattcgctttgcctccgtctatcgcagtttcgaagatatcaaagactttggcgaagaaatcgctcgcctacaggactaagccatgcaggatgagttttacatggcgcgagcgctcaaactggcgcagcgtggacgtttcaccactcaccctaaccctaatgtcggctgtgtcattgttaacaatggcgacatcgtcggcgaaggttatcaccatcgcgccggagagccgcacgccgaggttcatgcgctgcggatggcgggcgcaaaagccaaaggcgcaaccgcctatgtcacgcttgaaccctgtagccatcatgggcgaacgccgccatgttgcgatgcgctgattgcggccggcgtcgcgcgcgtggtcgccgcgatgcaggacccgaacccacaggtcgccgggcgtgggctgtatcgcctgcaacaggcgggtattgcggtcagccacgggttaatgatgagtgaagcggaggcgctcaataaaggcttcctcaagcggatgcgtaccggattcccttatcttcagcttaaactgggcgcctccgtcgacggacggacggcgatggccagcggcgaaagccagtggatcacctcgccgcaggcccggcgtgacgttcagcgcttgcgtgcgcaaagccacgctatcttaaccagtagcgcgacggtattggctgacgatccggccttgacggtgcgttgggcggagttagacgcctctacgcaggcgtcttacccgcaggaaaatctgcgccagccggtgcgaattgttatcgacagccaaaaccgggtaacgcctgcgcatcgtattgtgcagcagcctggcgaaacgtggatcgcgcgtacccaggaagatagccgcgcgtggcccgatgcggttcgtactatcagcgtgccggcgcacaacggacatttggatctggttgtgctgatgatgcagttaggcaggcagcagattaatagcatatgggttgaagccggaccgggactggcgggcgcgttgctgcaagccgggctggtggatgaactgattgtctatgtcgcgcctaaattgttgggaacccaggcgcggggattatgcgaattgccggggcttgagaagctcgccgacgcgccgcaatttaccttcagcgaaatacgtcatgtcggcccggatgtttgcctgcatatggtgagcgcatgagttctcccgtcgaaaggggagcagcgctcaaattattatgataaaatccgcccccctgcggggccaaatgaaccctggaagagagaatatgaacattattaaagctaacgttgcagcccctgacgctcgtgtcgccatcactattgcgcgtttcaatcagtttatcaacgacagcctgctggatggcgcggttgatgccctgacgcgtattggtcaggtaaaagatgataatattaccgtagtgtgggtgcctggcgcctatgaactgccgctggcgaccgaagcgctggcgaaaagcggtaaatacgacgccgtggttgcgctgggaaccgtgattcgcggggggactgcgcactttgaatatgtggcaggcggcgccagcaatggcctggcaagcgttgcccaggacagcggcgtgccggtagcctttggtgttctgaccaccgagagtattgaacaagccatcgaacgtgctggtacaaaagccggtaataaaggcgcagaagctgcgctgaccgcgcttgaaatgattaatgtattgaaagccattaaggcctgattttttgtaaggggaattccgtgaaacctgctgctcgtcgccgcgcccgtgagtgtgccgtccaggcgctttactcctggcagttgtcccagaacgacatcgctgatgttgaataccagttcctggcggaacaggacgtaaaagacgtcgacgttctctatttccgtgaactgctatccggggtggcgactaacagcgcgtacctggatggtttaatgaaaccgtatctgtcccgcctgcttgaagagctgggacaggttgaaaaagccgtgctgcgtattgcgttgtttgagctgtcaaaacgcagcgatgtgccttataaagtggccatcaacgaagcgattgaactggcgaaaacctttggcgctgaagacagccacaaattcgtcaacggcgtactggataaagcagctccggtgattcgtcccaacaaaaagtgattcacaggccggaaagatagcgggcgctcgatacccgccgtctccggccttttctttttttctgctgaggcataacgtatggcatgtggcgagttttccctgattgcccgttattttgaccgtgtaagaagctctcgtcttgatgttgaaaccggtattggcgacgattgcgcgctcctgaatattcctgaaaagcagaccctggcgatcagtaccgatacgctggtggcgggcaaccacttcctccctgatatcgatcctgccgatctggcttataaagcgttggcggtgaatttaagcgatctggccgcgatgggggccgacccggcctggttaacgctggcgttaacgctaccggaagtggatgagccgtggctggaggcttttagcgacagcctgtttgcgctattgaattactacgatatgcagctcattggcggcgacaccacgcgtggaccgctgtcgatgacgctgggtatccacggttatatcccggcagggcgcgcgctcaagcgatctggcgcgaagccgggcgactggatttatgtcaccggtacgccgggcgacagcgctgccgggctggcggttttgcaaaaccggctacaggtgtcggaggagaccgatgctcactatttaattcaacggcatttacgtccgacgccgcgtattttacacggccaggcgctgcgtgacatcgccagcgcggctatcgatctttccgatggtctgatttccgatctggggcatatcgtcaaggccagcggctgtggggctagagtggatgttgatgcgttgccaaaatccgatgcgatgatgcgccatgttgatgacgggcaggcgctgcgttgggcgctttccggcggcgaagactatgagctgtgctttacggtgccggaactgaaccgtggcgcgctggatgtcgccattggtcaactgggtgttccctttacctgcataggccaaatgagcgcagatattgaagggctgaattttgtacgtgacggaatgcctgtcaccttcgactggaaaggatatgaccattttgccacgccataaagatgttgcgaaaagtcgcctgaatttgcgcaatccgtggcacctgctcgctaccggctttggcagcgggctgagccccgtggtgccgggcacgatgggctcgctggcggcgatccccttctggtatttgatgacgtttctgccgtggcagctttattcgctggtcgtgatgtttgggatctgcattggcgtttatctttgccatcagacggcgaaagatatgggcgtacacgaccacggcagtattgtctgggatgaatttatcggtatgtggataacgctaatggcgttgccgacgacggactggcagtgggtggctgccgggttcgttattttccgcattctggatatgtggaaaccctggccgatccgttggtttgatcgcaacgtgcacggcggcatggggattatgatcgatgatatcgtcgccggggtgatatccgctggcatactgtattttatcggtcatcactggccgctcggtattatttaaagggtttgccggatggcggcataaacgccttatccggcctgcccctgaacaatatgtcgatttcgcaggcccgataagcgccgcgccatcgggcaatggcagattatttaaatcccactaccggatgctgtttgtacggcgtttcgagttcggcaatctgctccggtttgagcgttaaatcaacggcattcagcaactcatctaactgttcttcacgcgaagcgccgataatcggcgcggcgacgcctcgtttgctgagcagccagcccagcgcaacctgcgcccgcgttgcgccaagcgcctcgctgacgccagccagccgttccgctatttgcgcatcatttttatcgctttcatcgtataaatttttacccacgtcatccgagaccaggcgggccgtggtttctccccaggggcgagttaagcgcccgcgcgccagcggactccacggaatcacggcaacgccttcctgccagcacagcggtagcatctcacgctcttcctcgcggtagatcaggttatagtgatcctgcatggtgacaaacggcgcccagccgtgttgtttttgtagcgccagcgcctgggcaaattgtgaggcgtgcattgaggaagcgccgatatagcgggctttacccgcctttaccacgtcgtttagcgcttccagagtttcttctatcggcgtggtgtaatcccagcggtggatttgcaggatatcgacatactccattcccagacgggcgaggctatcgtcaatagagcgcaggatttgtgcgcgggacaatccttccggcagatcgccgacgcgatggaagactttcgtcgctaccaccacctcgtcgcgccgggcaaaatcacgcagcgcgcgaccgacaatctcttcgctgctgccgtcggagtagctgttggcggtatcaaaaaagttaatgccgccctcaagagcgcgcttgatgatgggacggctgctctcttcgggaagcgtccaggcgtgattgccgcgacttggctcgccgaatgtcatacagcccagacaaaggcgggatacccgaagatctgtatttcctaacgtgttgtattgcatgactccgctcctgttatacccgtcactcttcaagcatagcaggagcaaagaggggattatgccagccaggccttgattttggcttcaatgcctgcggcgtcaagccccagttccgcgcgggcttcttcctgcgttccttgcgggataaagaaatccggaagaccgatattcagcacaggtacaggtttacgatgggccattagcacttcgtttacgccgctgccagcgccgcccataatggcgttttcttccagcgtcaccagcgcgtcatgctgcgcggccatctccagaattaacgtgtcgtccagcggcttaacaaagcgcatgtcgaccagcgtggcgttcagcgcttcggcgactttcgccgcctcaggcattaaggtgccaaagttcagaatcgccagtttttcgccatgacgcttcacaaggcctttaccaataggcagtttttccagcggggttagcgccacgccctgcgcattaccgcgtggataacgtactgccgtcgggccgtcgttatagtgatacccggtaaataacatctggcgacattcgttttcgtcgcttggcgtcatgatcaccatatccgggatgcagcgcagataggagagatcgaacgcgccctggtgtgtttgtccatccgcgccaacgataccggcgcgatcgatggcgaacatgaccggcagtttctggatagcgacgtcatggatgacctgatcgtaggcgcgttgcaggaaagtagagtagatcgccacgacgggcttatagccgccaatcgccagacctgcggcgaaggtgacggcatgctgctcggcgatggcgacgtcaaaatagcgatccgggaatttacgtgaaaattccaccatgccggaaccttcgcgcattgccggggtgatcgccatcagcttgctgtctttggcggcggtttcacacagccagtcaccgaagatttttgaataaccgggcagaccgccgctgcttttcggcaaacatccgctggagggatcaaatttaggcaccgcatggaaagtgatcggatctttttccgcgggctcatagccgcggcctttcttggtcatgatatgcaggaactgcggccctttcaggtcgcgcatgttcttcaatgtgctgataagccccatgacatcgtgaccatcgaccggcccgatgtagttaaagcccagctcttcgaacagtgtgcccggcacaaccatgcctttaatatgttcttcggtacgcttgagcagttctttaattggcggtacgccggagaagaccttttttccgccttcgcgcagagaagagtaaagcttaccggaaagtagctgcgccagatggttgttgagcgcgccgacgttttccgaaatcgacatttcattgtcgttcagaatgaccagcatgtcgggccggatatcgcctgcgtgattcattgcttcaaacgccataccggcggtgatggcgccgtcgccaatcacacagacggtgcggcgatctttgccttctttctccgccgccacggcaataccgataccggcgctgatggaggtggaggaatgcccaacgctcagcacatcgtattcgctttctccgcgccacgggaacgggtgcagaccgcctttctggcgaatggtgccgattttgtcgcgacgaccggtaaggattttatgtggataagcctggtgtccaacatcccagattagctggtcaaacggggtgttgtagacataatgcagcgccacggtaagttctaccgtgcccagcccggaagcgaaatgcccgctggaacggcttacgctgtcgagtaagtagcggcgtagctcgtcgcagagtttcggcagactctctttcggtaacagtcgtaactcctgggtggagtcgaccaatgccagggtagggtatttggctatatcaaaactcatcgcaagctcattggatatggggtttatttatcacgctggattatgtagttcgctagcgcttccagtgccgaggtgtccagtgattgcgcggccagctgatgtaacgactgacgggcgtcctctatcaggtcccgggctttattccgggcttgctcaagacccagaagtgcagggtaggtacttttgccaagctgctggtctgcgccctgacgtttacctaacgttgcagtatcgcccaccacatccagaatgtcatcctgaacctggaaggcaaggccgatactctctgcatagcggtcaagtatcggcagagtattccgtcctttatcgcccgcgctcaatgcgccaagtctaacggcggcgcgaatgagcgcgccggtcttatggcgatgaatgcgttccagcgcgtccagagtgatccgctggccttctgccgccagatccaatgcctgaccgccgcacataccggcgataccgctggcgtttgccagttcggcgatcatcgcgatacgatcgcgatcggcgacttccggcatcggcgcgtcgctgataatggcaaacgccagcgtctgcaacgcgtctcccgccaggattgcgttggcttcgccaaatttaatatggcaagtcggcaggccgcgacgcaaatcgtcatcgtccattgctggcaggtcgtcatggatcagcgaataggcatgaatgcattcgaccgccgcagctggcgcatccagcgttgccgtactgacgccaaacatttgaccggtggcgtaaaccagaaatggccgcaggcgtttaccgcctaataatgcgccatactgcatggcttcgaccacgggagtgttctgaaagggcagtggcgcgataaaacggctcagcgcctgattcgcttgcgttacgcaagcctgtagctgctgcgtaaagtccatttactcattatccgcgataaaaggctcaggtgaagcctcttcattatcagacagcaaaatttgcacgcgctgttccgcctgctgcagttttgcctgcccctgacgcgccagttgtacgccgcgctcgaattcattcagcgcgtcttccagcggcaaatcgccgctttccaggcgggtaacaatatgttccagctcgctcagcgcagtttcaaagctggcgggcgcctcatttttcttcggcatgatgactgtttgactctctgtaatggcagtacaagtctatggtaacggactcacactgataagcaaataacgcgcaatggtaaggggaaatgcgcaagatgtccgtgatagtgatatacttccgcgcctggatgcagccgtaggtatgggctgctgtactatttctccacgacaagccttagatagcttgctaaagaaccattgccgccatgaagtttatcattaaattgttcccggaaatcactatcaaaagccaatctgtgcgtttgcgctttataaaaattttaaccgggaacatccgtaacgttttaaagcactacgatgagaccctcgcggttgtccgtcactgggataacattgaagttcgcgccaaagatgaaaaccagcgtctggtgattcgcgacgcgctgacccgcatcccggggattcaccatattcttgaagtcgaagatgtgccgttcaccgatatgcacgacattttcgagaaagcgttggcgcagtatcgcgaacagcttgaaggcaaaaccttctgcgtgcgggtaaaacgtcgcggtaagcatgagtttagctccattgaagtggagcgctatgttggcggcggattaaatcagcatattgaatcggcgcgcgtgaagctcactaacccggatgtgacggtgcatctggaagtggaagatgatcgcctgctgctgatcaaagggcgttatgaaggtattggcggtttcccgattggcacccaggaagatgtgctgtcgctgatctccggcggttttgactccggcgtctccagctatatgctgatgcgtcgcggctgtcgcgtacactactgcttctttaaccttggcggcgcggcgcatgaaatcggcgttcgccaggtggcgcattacctgtggaaccgctttggcagctcccatcgcgtgcgttttgtggcgattaacttcgaaccggtggtcggcgagattctggagaaagttgacgacggccagatgggcgtggtgctcaaacgtatgatggtacgcgcggcgtcgaaagtggcggaacgttacggcgtacaggcgctggtgaccggcgaagcgctgggccaggtatccagccagacgctaaccaatttgcgcttgatcgataacgtgtctgacacgctgatcttgcgcccgctgatctcttacgataaagagcacattatcaacctggcgcgccagattggtacggaagattttgcccgtacgatgcctgaatactgtggcgtgatttcaaaaagtccgacggtgaaagccattaaagcgaaaattgaagccgaagaagaaaacttcgacttcagtattctcgataaggtggtagaagaagcgaacaacgtcgatattcgtgaaatcgcccagcagacccagcaggaggtggtggaagtagaaaccgtgagcggtttcggcccgaacgacgtgattctggatatccgttctgtggatgaacaggatgacaagccgctgaaagtggaaggtgtggacgtcgtttcgctgcctttctacaagctgagcactaaatttggcgatctcgatcagagtaaaacctggctgctatggtgcgaacgtggcgtaatgagtcgcctgcaggcgctctatctgcgcgagcaggggtttgccaatgtgaaggtgtatcgtccgtaattcctttgccgggtggcggctatgtcctacccggcctatcgttttatttctgccccaaccgttttgcaatgcgctccagcttcatcatcagcagcagcgtaatggccaccagcacaatggtcagcgccgcgccgtcggcgatatttccacggtcggtcaagctaaagatagccaccggcagcgtcgtccagcccggcggataaatcatcatcgtcgcgcccaactcccccatggagagcgataaactcagcgccagcgctgacatcatccacggcatcaataacggcaacgtcacgtgacgcagacgataccagggcgatgcccccagactcgacgcgacgttttcaatatcggcggaaattcgcgccagtccggtcgacacgttactgaaggtaaaggcggaaatcagcacaaagtgcgctgtcagcacaatccatagggtgccgttcatttgcaatggcccctggctgaaagcaaccagaatgcccaggcccacggacactgacggaatcgcactcggcagatagaacaccatacttaaccatttctgcgttttcaccccatattgacgcagcgccagcgccgcccaaacgccgcaaagcagcgcaaacaggctggcgcaaaagccaatcgtgaggctggcaagtagggcatcccatgccgcaccgtgcagagcgttaacaaagtggttcagcgtgaagccactcggcagaataccgttccactgctggctaaggctggacatcagaatcaccgccagcggcaggaaaaagaacacgataaacagtacgctagccacaacgcccgccgctgcgcgtcctttaggtgaccaaattagcatggctagctccttacgccggtacgcgatgccgccaggcgatagagggagaacagccccagcgacaagacaatgttaatcaacgcaatcatgcaggcgaccgtatagtcggactccagaatcgctttgctgtaaaccatcatcggcagggtgttaacccctttcgcgccaataaacagtacgatgccgaactcgttagtggtcaacagcaggcacaggctgccaccagccatcagcgccggtagcgcagccgggaaaatcacctgcccaatcacccgtaacgggtgcgcccccagaatactggctgcctctagctggcttttatcaatttgccgcagcgcggccatcagtggccgcatcaccagcggagtgaacaccgtgatctccgccagaatgacgccctgcatcgagtagagaaaatccaccggcggtagctcaaaggcaaacaggctcatcagcgtaccgttgagcagacccgctgacccataaataaaggtgaacgccagcgtaatcaggaaggtcggcagcgcaataaaagtatcgacgacccgaccaatcaactcgctgccggggaaaggaataaacaccagaatcagcgacatcacgctgcccagcagcaggcaaccggcggtggcgaaaaaggcgatttgcaacgtgttcagcaacgcgccgacaaagcgtttcgagtcgaccacctggcggaaggtctcgagcccgatctcgccattggcaccgcgtagcgcctgttcaacgatgagcgacagaggccagaaaaacagcgtcgccagcaccagcaacgggagcagcagccacagcagcgggcgtaggttaagcgccggtttttccagaggtaaaatgagtgacatggttatacctcaatcaggaccgcatcatccggttcgaaccacagcgccagcttgtcgcccacgcgcggcagcggattgacatgcgtcaacaccatccgcaccgtttcgccagcaacgtcacacagcagatgggttaaatcgccctgccagtgcaccgattgcagtgtggcgttgaagcggttgctgtaggccgaacgcggcgtcaggctgaggtgctgaggacgaatgcacagcagtttgttgtaaccgtggtggctgccccggctgaacgcgcgaatcaccgcaccgccgcagctgacgtccaccagccccggagcctccgttatccccagcgcgatggcggagagaatattggcgcgacctaagaattcggcggcaaaacgattgggcggatgctgatatagcgcgcgggtttcgccgtgagcaatcagcgagccatccttcataatgccgattttatcggccagagtgagcgcttccgtttgatcgtgggtgacgtagagaatagtgagttccggcagctcacggtgaagacgggcgatttcttccaccatattatgacgaatctgtgcgtccagcgctgacagtggttcatccagcaacagcacgcgcgggcgcacggcaatcgcgcgggcgatggccacgcgttgctgctggccgccggaaagttgatgcggataacgggcggcgtaatcactcatgccaaccgttttcagcgcctgcgttacacgctcattaattagcgcctttggctgcttctgcgcacgcaggccaaaagcgacgttgtcttccactttcagatgcgggaacaaggcgtagttctgcaccaccatcgccaacccgcgtttatagggtggcagatgggtgacgtccgtatcgccaatcagaatacgaccgcctgcaggttgcacaaagcccgcaaccgcacgcagcaccgtcgtttttccagatcctgatgggccaatcagcgccagcacttcgccaggttcaatcgtcaaagagagcggtttaagcaccacgttgccgtgatacgcaacgcgcagcgagtcgaggactatccccgatgtcccctgcgatgcaggggcgtgaacggtggtcgttttcatcagcatcaggcttactcgctttcggtcactttgtgccaacggctaatatctgccgacagcgaaacggctacgtcatcccaatttggctgccagctctgcacgccttctaacgcggcagtggcggccttataatgttcgtcgctcggcgtcacgtcgctgcgtaccggcattccccaggagagttcgctgacgcgagtctgcgcttctttactcagcaggaagttaatcagctttttaccattttcactctgcggcgccccctggaccaggccaatgacataagggatggccagcgcgctgcgctcgcctttgtcgttggccggccagaagattttcacgttcgggttacgttccatctgcgcgaggttcatttgcaggtcgccgttagcgacgtagatttcacctttattaaccagcgcggttagcttgccggtagaggcagatggcccgacgttattggcctgcagcttgccgagatacgcaaaaccggcatctttactgccgaagctgtggaaagcctgcagcatcaccgccgtgccgtcagcggcctgacctggcgtggaatactggagtttatttttgaatttaccgtcaagcagatcctgccagctcgccggggcagttttcagcagcttgctgttgtagataaagctcagatagttctttaccagcggcgaataaaggttgttggcatcggggatagccgatgcggtgtcggtgttaaagttcgccagcagcttttcggcggcggcgcgctgaatgaatggcggcgcggttaccagcacgtcggcctgtggattcgtgcgctcttttgccagacgttccactaccacgccaccaccgccttcaacatagcgtacggtaatgccggtcgctttggtgaatgcgtcaaactgtacctggtaccagctgttatcgccatcatgcagcccgtcgatggagtacaccgtgaccaccgattccgcccatgacggggcgctggcgagagcgaagacagacagcagagcaagtcgggaaagtttcatcgtaatagcctcatagcgtacgttgcattttctggcctataccaggtttgctttttacgctaaacggcttatatgacaaaacgatgaaagagaaataaatcagtccacgccggatgatgctgcgcttatccggatagccgtgagacgatacgattggtaggccggataagtcccgcagccaacatccggcgcatccgctagtgggtatctacctcaatacgcaggctgtcgtgacgccagtattcgatatccagatccagcactcgcccgtgttgatcgtagttcagacggcgcagcaacagcgccgggcgcccttccataacgcccagcgcctgtgcggcctgcgcaggcatggcggtggggtagaacgacagatgcatgctggtatagacgaggttgtagtgcgactcgtatacctcggtcaggctgccgttgagatcgtactgcagcagctcaggcacgcgggcgggcaaacaatggttttcgcagtagcacacggcgcggccatcggcgtaacgcagacgggtcagcagatagatttgatcaaacggctggagctggaggggctccatgacctcgacaggcacggtggttaacacgccgctcagtagcgcggtttttggctcccgcccctgctcgcggcaaagcttatggaagttggtgttctgggtcggatccagccacaggcgttccggcgtaacgaaccaaccgcgacgatcggcgcgccagataagcccactggactccagctgtgccagactttcgcgaatagtaatgcgcgtggtgttgaagatcgcgcacagttcgcgttcagacggcagtttatcaccgcttttcaacgcaccgctctgaatacgcgcctgaagctgcgccttgatcaacaggtactgcgggatatcgcccgggatagatttcatgcttactcgcttccgttttgcctgccgccattatacaagcagagatgaattttttgttgcagcgcgattttctctttgacccgtcgcggcaaagatcgtcatgataaatgcaatctggtatagaccaaaggtaaataacatgacttcgcgtaactatctgttgctgactcctggcccgctcaccacctctcgcaccgtgaaagaagcgatgttgttcgatagctgtacctgggatgatgattacaatatcggcgtggtagaacagatccgccagcagctgaccgcactggcaacggcctccgaaggctacacctccgtactgctgcaaggcagcggcagctatgctgtggaagccgtactgggcagcgcattggggccgcaggataaggtgctgatcgtcagcaacggtgcatacggcgcacgaatggtcgagatggccggccttatgggaatcgcccatcacgcttacgactgcggcgaagttgcgcgcccggatgtgcaggcgatcgacgcgatcctcaacgccgacccgacgatcagccatatcgccatggtgcatagcgaaacgaccaccgggatgctcaaccccattgatgaggtgggcgctctggcgcatcgctatggcaaaacctacatcgttgacgccatgagcagcttcggcggcatccccatggatattgcagcattacacatcgactatctgatcagctccgccaataaatgcattcagggcgtgccgggttttgcctttgtgattgcccgcgagcaaaaactggccgcgtgcaaagggcattcccgctcgctgtcgttagatctctacgcccagtggcgctgcatggaggataaccacggcaaatggcgttttacttcgcccacacataccgtcctggcgtttgcacaggcgctgaaagagctggcgaaagaaggtggcgtagcggcacgtcatcaacgctatcagcaaaatcagcgcagcctggtggccggaatgcgggcgctgggctttaacacgctgctggatgacgaacttcattcgcccattatcaccgccttttattcaccggaagacccgcagtatcgctttagcgaattttatcgccgcctcaaagagcagggctttgttatctatcctggcaaagtgtcgcaaagcgactgcttccgcatcggcaatattggcgaagtatatgccgccgatatcacggccctgctgaccgccattcgtaccgccatgtactggacgaaataaggaaccatgatgaaccgtattcacgctgttattctcgactgggcgggcaccaccgtcgattttggctccttcgcgccgacgcaaattttcgttgaggcgttccgtcaggcatttgatgtggagatcaccctcgctgaagcacgcgtgccaatggggctgggtaaatggcaacacattgaagcgctgggaaaattacctgctgttgacgcgcgctggcaggcaaagtttggccgctccatgagcgcagcagatattgatgccatctacgccgctttcatgccgttacagattgctaaagttgtcgatttttcttctcctattgccggagttatcgacacgatcgcggcgctacgagccgagggtatcaagataggctcctgctccggttacccacgagcggtgatggagcgcctggtccccgccgccgccgggcatggctatcgtccggatcattgggtggcaacggacgacctggccgcgggtggtcgcccggggccgtggatggcgctgcaaaacgtgattgcgctgggcattgatgcggtcgcgcactgtgtgaaggtagatgatgccgcgccgggcattagcgaggggcttaacgcggggatgtggacggtggggctggcggtatcgggtaacgaattcggcgcaacatgggacgcctatcagacaatgtcgaaagaggacgttgcggtccgccgcgagcacgcggccagcaagctgtacgccgccggggcgcattacgtggtggattcactggcggatttacctggggtgattgcgcatattaatgcgcgtctggcgcagggcgaacgcccgtaaaataactgccggatggcgctgtcgcttattcggcctacagactgtaccgttttgtaggccggataaggtgtttacgccgccatccggcaatcattcttattcgtagtagttataaatccccgccgccatcaccagttgcgaagccacttcatgcgctttttcacgaccagccaacaggtcgatgattttcaaaccaaaatcgatagcggtacccggtccctggctggttaataattttacccgcgcatcccacaccacacgcttatccagccactgttcggcggggatcttatctttcagcgccggaaaaccggtcatattgccgatagggaagatatcgtgcggcacgagcactgtggcggctgcggcgcaaatggctgcgacaatgcgcccggagcggtgaaactgttttacggtttcgaccagcagcgggctgtcgcgaaagcactcggcgcctttaattccgccgggcaacacgatgatgtcataatcgccgtcggcaacttcaaccagcggcgcatccgccagtagctttacaccgcgcgagcagacaatcgtcaggttgccatcgctggcgacgctggcggtagtgacgtggattccgccgcgaaccagcagatcgatagtggtgaccgcttcggtctcttcactaccaggggcgaggcataccagtgcctgagcgctcatactcactctcctttcgctttaccatttcaaacaggcggctattttccggaacggcgagaccgtgcacgcgggcgcgcttgagtaaataaccggtgatgtagtcaatttcggtatggcgcatggcacgcacgtcctgcaacatggatgagatgttttctgccgtactgtcaatcacttgctcaacataatagcgtaaatcgtctgccgatgtgtggtagccttcacgttcaatcacggcggcgacctcttcgcaaatcgcgttgatttcatcagtatgatggcgcagctcgccgttcgggcagttccaaagcgcggtgagcgggttgataacacagttgaccgccagtttgcgccacatctctgcgcggatattgttatgccaggcgacatcgggcagtaccccctgcaggatatcggcgagataactgtaatcgccgtcttgctcgcgcgccgggccaatatgcgtagtaccgttagcgacatgaataatgatattaccgtcgcggcgcgcagcatgggtgatagtccccatcaacatcggctgttggatattttgcagttcttctatggttcccattccattatgaatgagcaggataggcgacgtcaccggtagggttgacgccagggttcgtactgcgtcggaaacctgccacgctttcagcgtgactaataacagttcgctcttcgccaaaaaatccggatcgtttgccgtcagtgattcgttgaaaaaggaaccatcggtatcgatcagatttacgctgcaataaggttgtggcacccgtagccagccctgtacgtcatgtccgtgtttgcacagtgccgaaagccaaagttgtcctaaggctccgcatcccagtacagtaattttcattgttcctcctcacctgcaacagcgccaggtgttatggcgctaattatagcgtcatcagctaagcttctcgttaagcctcgttgcaggtattatgcaacgcaacgaaaatgaagggagaagaaaagatgccatctttcgatattgtttctgaagttgatctgcaggaagcgcgtaacggtgtggataacgcggttcgcgaggttgagtctcgttttgacttccgtggcgtagaggcgactattgaactgaacgatgccaataaaaccatcaaggtgctgagcgagtccgatttccaggtcaatcagttgctcgatattctgcgcgccaagctgcttaaacgcggtattgaaggcgcttcgctggatgtaccggacgagttcgtgcatagcggtaaaacctggtatgtggaagcgaagctgaagcagggcattgaaagcgccgtgcagaagaaaatcgtcaagctgattaaagacagcaaactgaaggtgcaggcgcaaattcagggggaagagattcgcgtgacgggcaaatcacgtgacgatctgcaatcggtaatggcgctggttcgcggcggcgatttgggccagccgttccagttcaaaaacttccgcgattaagttgttatgccggatagagcctcgccgccatccggcaatgcagtattcatcctttgctgataagctgttcaacttcaaagcgattggtcactttgctgtcgattttgacgtaagcggaatgctcttccgccacgatcagcgcttcgcttacgcctttcattgccaacagtcgctgttttagcctgtcgtcagcaacgatatccgctggaatttccacacgcaggctgctgacatagggcggctctttcatggtacttgccactgccagccataccatcgccagtacggccccggcaaggaaaacggtttgcccatcaaacgtgccgtctatccagccgcccagcgagccgccaagcgccacgccaagaaactgactggtagaatagacgcccatcgccgttcctttataccccgcgggcgactctttgctaataagcgaaggcagcagcgcctccatcagattaaaggcgaggaaaaagagttgtacgccaatcaccagctcccagaaatgctggcccgctccccacaacacgatttctgcgacgacaatgagccccacgcagaacaggaatacctgcttcatccgccgtttgacttcagcatagataataaaaggcacgacggcggcaaaggcgatcaccatggttgccagatacaccttccagtgttcggcggcagggaaaccggcatcggcaagctggccgggcagggcgacaaaggtggacatcaataaaatatgcagacacataatgccgaaattgagtttgagcagcctcggctccgccagcactttactgaagctgcctttgaccatcccggattcgcgattcagcacatggttggtactgttgggaaccacccagatcgtcagaagaatgcccagagtggcgagggcggcgatcatccagaacaacgcgttcaatcccagactatgggtaacgatcggccctaataccatcgcaatcgcgaaggtgataccaaagctgacgccgataaacgccatcgctttggtacggttttgctcgcgggtgaggtcagacaggagcgccatgacggcggcggcaatagcgccggacccctgtagcgctcgccccagaataatgccccagattgagtgggagagcgcggcaatgacgctgcccgcgacaaataccgccagtccgccgacaatcagcggtttgcggccaatgcggtcggacagcagcccaaagggaatttgaaagatagcctgcgccagcccgtaaatgccgatcgcaatgccgattaatgcttcgctggcgccctgtagcgccataccgtatgtggtcagtactggtagaaccataaacatgcccagcatacgcaacgaaaagacggtccctaaaccccatgtggcgcgcagctcccctggcgtcattttataatcgttcattgccacctctgtataaaagctgggagtagtgtagtgcggggagtgtgccgggtaaatagagggttaattagcaaatattatgtttttgaaacagttgagctaaaaaagagataaattgttaacacgataggggcgatcgggagagtcagcatagccttgtgctcattcatattccgatctccttgagctgtagtggctatctgagccatctcagtatagtgtagcggttagccacggccttcaggctgtgtgcgctgttgctccatgttgcaatagcagaactcgtcaagccagactgtcagcgaaccgcgctgcctgagtgtggctggccggtgggtgattttaaacttttgctttgccataggaacccgattctgaaacgatggcaatgatcagatccgcccatcttctgaaaatttgatttattcaacaacgccgagactgatagcaaactttctgcgtgatggcgcgcgtttatcaggcagaagattcgtcagcagtcgcatttattatattattcaaggagtgaattcgttatggaaattaaatttttatcattatgtattttagcgggtgttttatttgttagccaggtgaatgcttcagcgaacaacggtaaagatgatgtaaaatatgctgcgcttacccagaaggatcttgatgctttgcctgtggaaaaaagagcttcggttctggatgaactggggtttatccatgaatacggccttagtgtaccgatgaatcgcgaacgggcgttgcagtattacaagcaggcctgtgagcttggcggtaactacggctgttataatgtgaagtatgcttatcagtatggcgacggagtggcgaaagatagcgctcaggccaataagtatgctaagaaaatgaatctggataatttattgattgagcaagaatatattgataagttttcgcaagaaatttacatggcaaaagcattggccgatacggataaatcgcagcgggcggcatttattagtatactaattcatgctctaaataatagacccgagagcgatgcgcttttttttagccgtattggatttaaccaggaaaaaacatttcggctggctacgttatggtcgcaggatggcgacccgcaaatggattatcagatggggcgactcacccttaatgacttttccggtcgctatgcggacgagccttatcaagccagacctgcgtcattgaagtggtttcgcgccgccgcggaaaaaggcgtcgttgaggcccaatctctcttggggggtatttattcggggggagagggcgatgagtgggggattaagccagacattcaggaagcacaaaaatggtatggacaggcggctaagcagggggacagcgatgcacagattgcgttaggtaaaatctattattctggcgcaacagggcgcactgattacgctaaagcgctggcattatttacgcaggttgaaaatgatggtactaattcgcgctcaacgatgccgttgagttggatgtattataacggtttaggtactgcacctgattgtgataaagcctggtcgtattacaagaaagcatctcgatatgtaggtaagaaagttgaggaaaaaatatttttaagtaaatgcgcagcggatattcagagtcgaaaaaacaatgcggatgctttacctaaagtaaccctgaaaaaagagagaattttctctcgcgggataacggctaaaccgaaagaatgcgcactaatttttcagattggcacagataaaatccgtaacatggcgaatttgcatattacgcttgaactgaagaatgctgatggaatggcaactgaggaaacgttgatgattccgccattcggtttgaatactctggggatagatatgcaaaatcatgatgttgatcctctcgttaccccatacgatctcccgctgtatacgcaagatttttgtcacgggatcggcgatatccattttacgctgaaatccgctacggcaacgattaacggtaagaatgtcgatttactgaaagctgacagtgtgcgctttttagataaagaataagggaatgaaaaatgataaaacggaaatggaatcttttgcttctgcttgggctttctttcgcatcggtatgccaggcaggtgatgatattgacgcgttgtatagccgtattgcgcagaaagatattcaggcgctaaatgagctaaaagcgttagccaaagataataacgcccaagcgctggcagaactggggtttatttatgagtacggcgtttcagtatctgtggatattccgcaagcaataaagtactacgagcaggcttgtgatttggacggtgattatggttgctttaatgcggcttatttctatgaatatggcatcggtacccaaaaggacattacgcaagcgaaaacattagcaaaacagcttagagaaaaaattaatctatccaatatcaatctcgataaaaaggtgagtgaacgtataattgggagtgtttatagtaataaacttgaggcatatagagacctttcatttcgtcctcattttattcaaggcttaagtttctatttttatgccccgcaatcagatgagcgaaaactgctgagtcgaataggttttgactcatcacatcttgcgcggatagcgatactctgggcgagagagggtgatcctgaggtcgcgtatcagacggcaaaactggtctctactttgtattttaataatgaaacgaaaacgatagatattgctgaagcgctgaaatggctccgaatttcggccgagaagggggatgccgactcacagacgctgttaggttttctttatgaacacgccggattgggattacaaccagatggagagaaagcccggaaatggtatgaaatggcggcgcagcaaggtaatggagaagcattgtatacgttaggtcgtatgtactattctggcgtactggttaacgttgattacgataaggcgctgtatttttttaaaaaagcttatgagaaaaaattacaggaggccgctgattatttagcacagatgtattttaatggccagagtgtagatgtcgattgccaacaatcctggcactattacgataacagctatataaaaaagatgacacaacgcgattatcttgattattgtgaaaaagatcgaaagcgccgtaatgattttaatcagcaacttcctgagctgacattagaaaaatatgcgggattatttggcaggattgataatattcctctgtgtcagattggatttgttgtcaatacgaataagttaattcatgttgcgaacttacgtgtggaattgatattaaaaaatgatgctggagttagtgacgaaagaatggtcgcttttcctcctttgggtctcaatactctgggtgctgaacagggtatgggggattcttttaagtcgatgggatatctcttgatgaaaaacggtgacttgtgtgattaccataaacttactttcaccgtgaagtcagcgacggcaacaatcaatggtaaaaaagttgatttactgaaaacggataatttacatattattcagaatcgataactcgtggggcgttactgcctgatgaaatggataaaaaaaccgccgtttgtgacacggcggttttttcaatagcaacgcttgttaccagacgtaagtcagcagattctgcgaattcggcaccataaaatcaacggacatcatgatactcagcgcggtaatcgcaatgatagagaagccgaacagcttgcgcgcccagaccttatcatcttccactttgtaaccgcgtagcgccatgccgagccaccaaacgctgaccgccgcggcgaccaccaggtatttgtaaccggcataaccgcccaacgtgagcattagcgttgcaacggcaaacgcaatgatgtacagcgtgatgtggtttttagcgactgagattccttttaccaccggcagaaccgggatattggccgcctgatagtccttaaagcggaaaatggcgatggcgtaagagtgcggcatctgccagaggctgaaaatagccaacaggatcgccgcgccgctgtcaaagtcgcccgttacggcgcagtagccaatcaccggcggcgctgcgccggagagagaaccaatcagcgttccgtagacggagtgacgcttcatgtacaagctgtacacgccaacgtagaccacgaagcccattacccccagccagcaggccagaggattggcgccaaaccacaacagcataaagccagcaatacccagcagggtggcgtataccagcgagacgccaggagaaatcaggcctttgaccagcacccgattcttggtcctttccatcttcctgtcgatatccctgtcgatgtagttgttaaatacacaacccgacgccacaaccagtgacaccccgaccagcgtataaatgaacaggggatagtcaatgctgccctttgaggccagcagaaatcccccgatcaccgagatcaggttgccaaagatgatgcctggtttcgttacttgcaggtattgcttaaacatcatactcgccgctcttagtgcatcatcatgttgtagttgaggttccacataatccagatggagcccacaaccaggatggcgatgatcagcacggtaaagatgaaggccgtcatgttccagccttcatcagatttggtgttcatgtgcaggaaacacaccagatgcaccaaaatctgcaccactgccattgccaggatagatcccagaataacggccggagaggcagcgccggtcatcaccatccagaatggaataaccgtcaggatgaccgacaggataaagccggtcatgtacgtttttacgctgccgtgggatgcgccgccgctctcggtagaatgactcattacatcgcccccatcagataaacaacagtgaatacgcaaatccaaatcacatccaggaagtgccagaacaggctcagacacatgatgcgggtacggttagtgctggtcagaccgcgacgggcaacttgcaccatcagcaccgccatccagatcaaaccggaagtgacgtgcagaccgtgcgtgccgaccagcgcgaagaacgcagacaggaagccgctgcgatccgggcccataccgttaacaatcaggtgatggaattcatagagttccatcccgataaatccggcaccgaacaagaaggtcaacgccagccaggagataacctggctcttgttgttcttgtgcatagcgatcgccgccatgccgtaggtaatggagctaaataacagcaggaaggtttcaaccagaacgaacggcagttcgaaaatgtccttacctgtcgggccgccagcggtgccgttcaccagaacggcataggtagcaaacagaatagagaacagaatgcagtcgctcatcaggtagacccaaaatccgaagattttgttctggcctgcgtcatggtgcccgtgttcgtgcgcgtgggcagtcgcgtgcgttaaagtatcagttgccatttttcagccctgccttagtaatctcatcgaaatgctggttttccagtttttcgacttccgggaccggcacgtagtaatccacatcttcatcaaagctttttacaatccagctgatgatcatgcctgcgaaacccactatcgccagccaccagatatgccagatcatggcgaagccaaataccgtcgcgaaggcggcgataacaataccggcaccgctatttttcggcatatgaatctcttcatactgtccaggctgttggtacgcttcgcctttttctttcatttcccagaaggcgtcacgttcgtgaacgtgcggcacaacggcaaagttatagaacggcggcggagaagaggttgaccactccagcgtacggccaccccatgggtcgccggtcagatcgcggttctgatcgcggtcgcgaatagaaacgaagatctgaatcagttggcacaggatacccagcgcaatcagcgcggcgccggcggcggcaaccatcagcatcgtatggaactgcggatcaatttgctggctgaggcgacgggtcatgcccatgaagcccagtacgtacagcggcataaaggctacaaagaaaccgataatccagaaccagaaggcgcgtttaccccaggtttcgttcagcttgaagccaaacgccttcggccaccagtaggtcatacctgcgaagcagccaaacaccacgccgccgatgatcacgttatggaagtgcgcaatcaggaacagactgttgtgcaggacgaagtccgcgcccggtaccgccagcagaacgccggtcataccgccgaccgagaaggtcacgataaagccaatggtccacatcattgcggaatggaagacgatacggccctgatacatggtgaacaaccagttgaagatcttcaccccggtcgggatggcgataatcatggtggtgataccgaagaaggcgttaacgttcgcgcccgcgcccatcgtgaagaagtggtgcagccaaacgataaacgacagtacggtaatacagacggtcgcccaaaccagcgaggtatagccgaacagacgtttacgcgagaaggtcgctgcgatttcggagaataccccgaagaccggcagaatcagaatgtacacttccggatggccccaggcccaaatcaggttgatgtacatcatcatgttgccgcccatatcgttggtaaagaaatgggtgcccagatagcgatccagggtcagcaacgcgacggtaaccgtcagaatcgggaaagaggcgatgatcagtacgttggcgcacaaagaggcccaggtaaagaccggcatcttgaacattgtcatacccggcgcacgcatcttcaggatcgtcacgaagaagttgataccggttaacgtcgtaccaatacccgagagttgcaacgcccatatccagtaatcgaccccgacgctaggactgtactctattcccgatagcggcggataagccagccaccctgtctgcgcgaattcacccacgcccagcgagaggttaaccagaataacgccgacaacggtgaaccagaagctcaggttgttcaggaaagggaaagcaacgtcgcgcgcgccgatctgcagcggaaccaccaggttcatcagaccgataacgaagggcatcgccacgaagaagatcatgattacgccgtgagcggtaaagatctgatcgtagtggtgcggcggtagaaaacccgcttcgcctgcggaggcaagcgcctgctggctacgcatcatgatggcatcggcgaaaccacgtaacagcatcacaatcgcgacgatgatatacatgatgccgaggcgtttatggtcaaccgacgttaaccactctttccataggtaggtccacttaccgaagtaagtaatcgctgccagtatcgccagtcccccgacgataattgcagcgatcgttaccatgacgataggttcatggaacggtactgcatccagtgataattttccgaacatcttatcttcctcaacccttggagttggcggattccgcgtggctcatgtccataccttccattccttcatgcgagctgtgctcaccttcaggttgggtcatgtccatgctcttaccgtggcccatgaatttgttaataacgtccttgaacaaatcaggtttcacgctggagaaatattccaccttgttgtactcgcttggcatagccactttctcgaacgccgccatatcattcatggtgttcggagactgcttcgcttttgcgacccattggtcgaattctgcgcggtctttggtggcgatagctttaaacttcataccagagaagcccgggccgctatagctggcggagatgccatcgtaggttccgggttcgttggcgatcagatgcaaacgtgtttgcataccggccatggcataaatctggctacccagacgcgggataaagaaggagttcatcacggagttggaggtcactttgaaataaaccggcgtgttcgccgggaaggcgatctcgttgacggtggcgataccctgctccggatagatgaagaaccatttccagtccatggaaaccacttcgatggtgatcggtttttcgtcatgcgccagcggcttgcttggttcaagcgcgtgcgtggttttccaggtcagtacggcaaggaaaatgatgattaagataggcaccgtccagaccacggcttccactttattggagtgtgaccagttcgggctatacttcgcatccttattactcgcacgatacttccaggcgaaaccaacagccatcaagatggcgggaataacgacgatcaacatcaggccaaatgccgtcagtatcagcgaacgttgctccagtccaatctgtcctttgggatccagcagcgcagaattacagccactgagtaatgcagtgcctgcaattaatgacaaccatcccaaacttttattgtatttcctgagtctcatttaacgacctcaattccacgggacctggtggcgtttaaagtgtaggggcattttacggtaaggttacattactgtaaacatgattggttctgtgttaccaagttctgccgcgcatgtcacatatgttgccaagtatgtcgaaataactttaagacactgttgaaactttgcgttataacggatgaggtctgtaagtgggatgttgagggataattggtataaccaatgtaaaaataaaacaattacttaacaatttattatcaataaaaggacaatcaacggcagaaatttaaatttaatcggctgaatcgtgtaaagaaaataggtagcgtagaaattaccaataatttccaaaattctgttgcgcacaaaaagacaaatatattttttatcaattgatggttatttagccgttataattccgggtcgttattacaacggcaaataatgttttacagcaggcgtgtttttcgtagcgccaggtagtccagcaacccgccaaagacaatgccgcacacggcaaccactaccgcagtctcaagcaattcgggcaggaatgagaagttagtgtaatccaccgcgttcatggtcagcaggagtacccataccgccagcaaagcgacgcccgcgagcaggattgaaagcgcgaaattgtaggcgccacggtattgcgtgcggggaatgaaacgctcgctctgccagctatattccagcgtttgccgacagaccagcaacagtaacagcccgggaacggcggcgacaaccgagaagaggtagaatgtcggccagccgtgcgcttcaacgaaccagcccgctacaggaccaacataaacgcggcctactgcggagagggccgacagtagggcaaactgtgttgcggaaaacgacttattacatagcgtcattaataaggcgacaaaggcggcagtacccatcccgccgcacagattttcgaaaaagaccgccgcgcccatgctgaacatgtttttatcggtaatggagagcaaccagtaaccggcgttggacgcgccttgcaaaatgccgaaaatcagcagcgcgcgaaacagcgaaagacgctgcattaatatgccgccgtataacgcgccgacgatcgttgccaacaggcccagcgttttattgaccacgccaacttcaccagcgtcaaagccgacgccgcgaatcaaaaaggtggtggtcaggctcatagcgaaggcgtcccccagtttataaagcacaatgagcagtaaaatcagccaggcgttattacggccaaagaaatcgcgtagcggcgcgacgacggcctgttccagcgatttcggggacgggatagtatcggtcggttccggcgccagtaaggtggcgataatgcaggggatcaacaatgccgccatcagccagtacatgccctgccagccgagccagcgatcggccagccatagcgccagtccgccggaaaccagcatccccaaccggtagccaagcacgctgattgccgcgccagcgccgcgttcttctgcgggtaaaacatcggttttccaggcgtcgaacacgatatcctgcgaggcggagcaaaaagcaatcaccaccgccagcgccgccatccagcgtagctgcgtgccgggttcaagaaagcccatcgccgcaatcgccgccagtaacaacagttgggtggcgagtaaccaaccgcgacgacgacctaaaaaaggcggcgtgtagcggtccatcagcggggaccagagaaacttaaacacataggcctgaccaaccagcgagaagaagccaatcgttttaagatcgatattctcgacggtcatccacgcctgtagcgtaccggaggtgagcgccagcgggagaccggaggcaaaacccaatatcagcagaatggctgagcgcggttgctggaaaatacgtaaatattgacttgacataggcatctacagacccggcttctgccgggtcttgttgttgctattaacgggcgttttgcttgataaaatcgtgaatactggtgtcctgagacatatcagcaatggtatcggtcagaacgctattcactgcgtcggcaatattctggttagaggcctggaacgccccttcaatagagtagttggcgcgatagtttttggtcatcttgctgccatttgccgcggtcgcaataatcgcgatatccgctttggtcgcgatgttgtagcgcacgctgccctgggaaacatcagcatacagttggttaacaattatctgcagattaaccgcgccgttaggcccgatcatatagccccgcgccgtcatctgtttttccaggacttcttgtaacaggaagcgtaaatcgcgggaggcggttaacgttaccagctggttgttacgcgtgactttcgctaacgcttgatcctggcgttggtccgcgccggtaatgctaacggtgacgcccatcaggctcgggtcctgctgtggcaaggtgatcttcggcgcgacgtcaatggtcgtcggcggtgtggcgcatcctgccagcataaacagagcgactaacggaaagagaagtttttttaacatattcaggctctcaatgacgcttaaaacgtgataggtaaaaattcccgccatcataacaccgctaacggcgaggggaagtggtcaacgcaggtaaattcgtcgtaatgtccgatttggtattgataacggcgcgagcggggattttgagcgctaaaagaatgattaaggcagtaaacttcatacgtttggctgaaataatcagacgaaagctaaatttttgttgtcatgctgtaatggaaacggtaaaagcggctagtatttaaagggatgggtgacatcacagcgttgtcggaggagattttcatgatgatacgtgagcaaatagaagaaaaattaaggacagcgttcgaccccgtgtttctcgaagttgtggatgaaagctatcgtcacaatgttccagcaggatcggaaagccattttaaggtcgtgctggtgagcgatcgctttacaggcgaacgttttcttaatcgtcatcggatgatttacggtacgttaacggcggaactttccacaaccgtacatgcgctggcactgcatacttataccctcaaagagtgggaaggattgcaggatactatcttcgcgtcgcctccttgtcgcggcgcgggaagcatcgcgtagcaaaacggatttgcaactacctccgcttttccagtatgttgctacagaattatgtgaaaacggcctgcgggccgttttgttttgtctgaattttgagcgtgtcgtacagtattcagacaaaaattagccgagaattgtgaaaaccgccgcagcatcgcacaatcaccgttctcgactcacaaaagtgatgccgctataatgcgccgtcttatatatgaacgtcttcgggatgattctgacgacagggaatgtgattgattacgagaacatcccggttccgcgaagcaaatagcacgtgcttgcggagtagagttgaccgagcactgtgattttttgaggtaacaagatgcaagtttcagttgaaaccactcagggccttggccgccgtgtaacgattacaatcgctgctgacagcatcgagaccgctgtaaaaagcgagctggtcaacgtagcgaaaaaagtacgtattgacggcttccgtaaaggcaaagtaccgatgaatatcgtcgctcagcgttatggcgcttctgttcgccaggacgtgctgggcgatctgatgagccgcaacttcgttgacgcgatcatcaaagaaaaaattaacccggcaggcgcgccgaactatgttccgggcgaatacaaagtgggtgaagacttcacttactccgtcgagtttgaagtctatccggaagttgagctgaccggcctcgagtccatcgaagttgaaaagccggttgttgaagtcaccgacgctgacgttgatgtgatgctggacaccctgcgtaagcagcaggcgacctggaaagaaaaagacggcgctgctgatgcggaagaccgcgtgaccatcgacttcaccggctctgtagacggcgaagagttcgaaggcggcaaagcgaccgatttcgttctggcgatgggccagggtcgtatgattccgggctttgaagacggcgttaaaggccacaaagctggcgaagagttcactatcgacgtgaccttcccggaagagtaccacgctgaaaacctgaaaggtaaagcggctaagttcgttatcaacctgaagaaagttgaagaacgcgaactgccggaactgaccgaagaattcatcaaacgtttcggcgttgaagatggttccgtagccggtctgcgcgctgaagtacgtaaaaacatggaacgcgagctgaaaggcgcggtgcgtaaccgcgttaagtctcaggcgatcgaaggtctggtaaaagctaacgacatcgacgtaccgtctgcgctgatcgacagcgaaatcgacgttctgcgtcgtcaggctgcgcagcgttttggtggtaacgagaaacaggctctggagctgccgcgcgaactgttcgaagaacaggctaagcgtcgtgtagttgtcggtctgctgctcggcgaagtcattcgtaccaacgagctgaaagcggacgaagaacgcgttaaaggcctgatcgaagagatggcgtctgcttacgaagatccgaaagaagtgattgagttctacagcaaaaataaagagctgatggacaatatgcgtaacgtcgctctggaagaacaggctgttgaagcggttctggcaaaagcgaaagtgtctgaaaaagccacttccttcaatgagctgatgaaccagcaggcgtaatttttcgcgttaaaagcacgaaatttgcacaaaaacccgtcacctttcagtgacgggttttttttgtcacgtattttgcatggtaagggtgcgaaaaccgcgtttcagtgttagcgttagagcaaaagattgttatgcttgaattatggcgatgccgtacccattacagagggactggctgataatccgtccatcaggttacaatcagtacagcagattttttcaatttttatccaggagacggaaatgtcatacagcggagaacgagataatttggcccctcatatggcgctggtgccgatggtcattgaacagacctcacgcggtgagcgctcttttgatatctattctcgtctacttaaggaacgcgtcatatttctgaccggccaggtcgaagaccatatggctaacctgatcgtggcgcagatgctgttcctggaagcggaaaacccggaaaaagatatctatctgtacattaattctcctggcggcgtaattactgcggggatgtccatctatgacaccatgcagtttattaagccagacgtcagcaccatttgtatgggacaggcggcctctatgggggcgtttctgctgactgccggggcgaaaggcaaacgtttctgcttgccgaactctcgcgtcatgatccaccagccgctgggcggctaccagggccaggcgacggatattgaaattcacgcccgcgaaattttgaaagtaaaagggcgcatgaatgaacttatggcgcatcatacgggtcaatctcttgagcagattgaacgtgatactgagcgcgatcgcttcctctccgcgcctgaagcggtagagtacggtttggttgactcaattttgacccatcgtaattgatgccctggacgcaagtgtgccgctatacacttcatccttcacgctacctcggtgttggctgccagcgcgcctcccagtgacttacttatgtaagcgcctgcagagtcgacgagttgccgccttgatgtagctcgaatgattttgtgtatatactaatgaagggcggcacaacgctgattagcggcttgcgcctgagaatggcatttgcgtcgtcgtgtgcggcacaaagaacaaagaagaggttttgactcatgacagataaacgcaaagatggctcgggcaaattgttgtactgctctttttgcggcaaaagccagcatgaagtgcgcaagctgattgccggtccatccgtgtatatctgcgacgaatgcgtcgatttatgtaacgacattattcgcgaagaaattaaagaagttgctccgcaccgtgaacgtagtgcgctgccgacgccgcatgaaattcgtacccacctggacgattacgttatcggccaggagcaggcgaaaaaagtgctggcggtggcggtctataaccactacaagcgtctgcgtaacggcgataccagcaatggcgtcgagttaggtaaaagcaacattctgctgattggaccgaccggttccggtaaaacgctgctggcggaaacgctggcgcgcttgctggatgtgccgttcactatggcggatgcgaccacgctaaccgaagcgggttacgttggtgaagacgtcgagaatatcattcagaaactgttgcagaaatgcgactacgacgtgcaaaaagcgcagcgtgggattgtctacattgatgaaatcgataagatttcgcgtaaatcagacaatccgtccattacccgcgatgtttccggcgaaggcgtacagcaggcgttgctgaaactgatcgaaggcaccgtcgccgcggttccaccgcagggcggtcgcaaacatccgcagcaggagttcttacaggtagatacctctaagattctgtttatctgcggcggcgcgtttgccggtctggataaagtgatcgctaaccgtgttgaaaccggctccggcattggttttggcgcgacggtgaaagcgaagtccgacaaagccagcgaaggcgagctgttgtcgcaggttgaaccggaagatttgatcaaatttggtctgattcctgagtttatcggtcgtctgccagtggtagcgacgctgaatgaactcagcgaagaagcgctgattcaaatcctgaaagagccgaaaaatgcgctgaccaagcagtatcaggcgctgtttaacctggaaggcgtcgatctggaattccgtgacgaagcgctggacgctatcgccaggaaagcaatggcgcgtaaaaccggcgcccgtggcctgcgttctatcgtcgaagcggcgctgctggataccatgtacgatttgccatctatggaagacgtcgaaaaagtggtgatcgacgagtccgttattgccggtcagagtaagccgttgctgatttacggcaaaccggaagcgcaggcttctggcgaataattaaacattcatacaatcagttagccaaaaaaggggggattttatctcccctttcgtttttcctgtaaacacgccgttgaatgtgtgggaaacatccccatatactgacgtacatgttataggtggtatggagcacagctatactatctgattacctggcggacactaaactaagagagagctctatgaatcctgagcgttctgaacgcattgaaatccccgtattgcccttgcgcgatgtggtggtttatccgcacatggtcatacccttatttgtagggcgggaaaaatctatccgttgtctggaagcggctatggaccatgataaaaaaatcatgctggtcgcccagaaggaagcatcgacggatgagccgggtgtaaacgatcttttcaccgtcgggaccgtggcctctattttgcagatgctgaaactgcctgacggcaccgtaaaagtgctggtcgaggggttacagcgcgcgcgtatttccgcgctgtctgacaacggcgaacatttctccgcgaaggcggagtaccttgattcgccagccattgatgagcgtgaacaagaagtgctggtgcgtaccgctatcagccagttcgaaggctacatcaagctgaacaaaaaaattccgccggaagtgctgacgtcactcaatagcattgacgaccctgcacgtctggctgacaccatcgccgcgcatatgccgctgaaactggcggataaacagtccgtactggagatgtccgacgttaacgaacgtctggaatatctgatggcgatgatggaatctgaaatcgatctgctgcaggttgagaaacgcattcgcaaccgcgtgaaaaagcagatggagaaatcccagcgcgagtactatctgaacgagcaaatgaaagcgattcagaaagagcttggcgagatggacgacgcgccggacgaaaacgaagcgctgaagcgtaagatcgacgcggcgaaaatgccgaaagaggcgaaagagaaagcggaagcggaactgcagaagctgaaaatgatgtctccgatgtcggcggaagcgaccgtggtgcgcggctacatcgactggatggtgcaggtgccgtggaatgcgcgtagcaaggtcaaaaaagacctgcgtcaggcgcaggaaatcctcgatactgaccattatggtctggagcgcgtgaaagaccgcatccttgagtatctcgcggttcaaagccgtgtaaataaaatcaaggggccgatcctgtgtctggtggggccgccgggggtaggtaaaacctcgttgggccagtccatcgctaaagcaacagggcgtaaatacatccgtatggcgctgggcggcgtgcgtgatgaagcggaaatccgcggtcatcgccggacttacattggctctatgccgggtaaactgatccaaaaaatggccaaagtgggggttaaaaacccactgttcctgctcgatgagatcgacaaaatgtcttctgacatgcgcggcgatccggcttccgcactgctggaagtgctggatccggagcagaacgtggcgttcagcgatcattacctggaagtggattacgatctcagcgatgtgatgttcgtcgccacttccaactccatgaacattccggcgccgctgctggatcgtatggaagtgatccgtctgtccggttataccgaagacgagaagctgaatattgctaaacgtcacctgctgccgaagcagatcgagcgtaacgcgctgaagaaaggcgaactgacggtcgacgatagcgcgattatcggtattatccgctattacacgcgtgaagcgggcgtgcgtagtctggagcgtgaaatctccaaactgtgccgcaaagcggttaaacaactgttgctcgataagtcgttaaaacatatcgaaattaacggcgataatctgcacgactacctcggtgtgcagcgctttgattatggccgcgcggatagcgaaaaccgcgtaggtcaggtgacggggctggcgtggacggaagtgggcggcgatctgttgaccatcgaaaccgcctgcgtcccgggcaaaggcaagttgacctacaccggctcgctcggtgaagtgatgcaggaatccattcaggcggcgctgaccgtggtgcgtgcgcgcgcggaaaaactgggtattaatccggacttttacgaaaaacgcgatatccacgttcacgtgccggaaggcgcaacgccgaaagacggtccaagcgccggtatcgcgatgtgtaccgcgctggtttcctgcctgaccggtaatccggtgcgcgcagatgtggcaatgaccggtgagatcacgctgcgtggtcaggtgttgccgatcggcggcctgaaagaaaaactgttggcggcgcatcgcggcgggattaaaacggtcttaattccgttcgaaaataaacgtgacctggaggaaattccggacaacgtgattgccgatctggatattcatcctgtgaagcgcattgaggaagttctgacgcttgctctgcaaaacgaaccgtctggaatgcaggttgtaaccgcaaaatagtgacctcgcgcaaatagcgctaataaaaacagggctggcaggctatttcggacttgccagcctttttttgtatagctaatttagatggttgattgggtctgccaccattaacgggtgttgtaagggcgtggcaggcctgatataactgctgcgcggtcgtacttcgaaggattcaggtgcgatataaattataaagaggaagagaagagtgaataaatctcaactgatcgaaaaaattgctgcaggggctgatatctctaaggctgcggctggacgtgcgttagatgcgattattgcttctgttaccgaatctctgaaagaaggggatgacgttgcactggtaggctttggtacttttgctgttaaagagcgtgctgcccgtactggtcgcaacccgcaaacaggtaaagagatcaccatcgccgctgccaaagtgccgagtttccgtgcaggtaaagcgctgaaagacgcggtaaactaagcgttatcccctcgggggatgtgacaaagtacaagggcgcatcaactgatgtgccttttttattggcgattcgggactttctgtgcgttgcgggctgacaattgccctcgtttcttgtcacaataggcttttgtgcgccgcgttcagaaaatgcgatgcgcgtgaagtctctatacgcaaatcattcaggttgcgtcgacgcggcgactgagcgaatcactcggtagccagcggagaagccgcctgaaagataaagtgtaaagtcacctacagcggagtgtggttacaccatgatggacagcttacgcacggctgcaaacagtctcgtgctcaagattattttcgttatcattatcgtgtcgttcattttgaccggcgttagtggttacctgattggcggaagcaataactacgccgcaaaagtgaatggccaggaaatcagccgggcacagtttgagaatgcgtttaacaacgaacgtaaccgtatgcagcagcagttgggcgacaggtattctgaactggcggccaacgaaggttatatgaaaagcctgcgccagcaggtgctgaatcgtctgatagatgaagcgctgttggatcaatattcccgcgaactgaaactgggcatcagcgatgagcaggtaaagcaggcgattttcgccactcccgcttttcaggtggacggtaagtttgacaacaaccgctataacgcgattgtgaatcagatgggaatgaccgccgatcagtacgctcaggcgctgcgtaaccagcttaccactcagcaactgatcaacggcgtggccggtactgattttatgctgaaaggggaaaccgacgaactggcggcattagtctctcaacagcgcgtggtgcgtgaagccgttattgatgtcaacgcgctggcggcgaagcagcaggtgaccgatcaggaagtgtccagctactacgatcagaataaagtccgctttatgacgccggaacagttccgcgtaagctatatcaagctggatgccgcgacgatgcaggcaccggtcagcgatgcggatattcaggcctattatgaccagcatgtagatcagtttactcagccggagcgtattcgttacagcattattcagaccaaaacggaagatgatgcgaaagcggtactggatgcgctgaacaagggcgaagatttcgccacgctggcgaaagagaaatctaccgatatcatctctgcgcgtaatggcggcgatatgggctggctggaagagtctgccacggtgccggaactgaaaaacgccggattaaaagaaaaaggccagatatctggcgtgattaagtcgtctgtcggttttctggtggcgcgtctggatgatattcagcctgccaaagtgaaaccgttaagcgaggttcgcgacgacattgccgcgaaagtgaaacaagaaaaagcgctggatgcttactatgcgttgcagcagaaagtgagcgatgcggcaagcaacgacaatgagtcgttagcaggcgctgaacaggtcgctggcgtaaaagccgttgaaaccggctggtttagccgtgacaccttaccggaagagctgaacttcaaaccggtagccgatgctatctttaatggcggtctggtgggcgaaaacggtacgccggggccgaattcagacattatcaccgtggatggtgaccgggcttttgtcgtacgcgtgagcgaacataaacctgaagccgtgaagccgttggcagaagtgaaagaacaggtcactgccctggtgaagcataataaagcggaacaacaggcgaagctggatgcggaaaaactgctggtcgagctgaaagcgggcaaaggcgcggaagcgatgaaagcggcggggctgagttttggcgagcctaaaacgttaagtcgtaccagtcaggatccggtgagtcaggcggcctttgcgttaagccttccgacgaaagataagccagtttatggcgtggcgaacgatatgcagggtaacgtcgttctgctggcgtttgacgaggtgaaagcgggcgccatgccggaagcgcagaaaaaagcgatggtgcagggcatcacgcagaacaatgcgcaaattgtctttgaggcgctgatgagcaatctgcgtaaagaggcgaaaatcaaaatcggcgacgctctggaacagcagtaatcgtcgaggcgcttcgcaaaaaattgcaaaacgttgtatcccacaaaggccgctttcgcggccttttccatttctgagaattgccgtttgttcgtttttctccgccccgctatcgtggctgcactgttaacaaacaaggagaaaacagtatgaaacacggaattaaagcactgcttattacgctttctttaacctgcgcgggcatggcccatagcgcgctggcggcgacgcctgtcgcaaaaaatgcagcggtggaaacaaaagcggatacgccttcttcatcctccgccaaagcggcattacctgctaaagccagcgatgatgaaggtaccagggtgagcattaataccgcgtctgcggaggatctggcgcgggtgatgaacggcgttgggctgaaaaaagcgcaggctattgtgagctatcgggaggagtatggtccttttaaaacggtggatgatttaaagcaggtgccgggaatgggaagcgcgctggtggagcgtaatctggcagttttaacattgtaatcacttgcacagtggccaaaatttgccagactgtagaggtcataccagttatgacctctgtacttgtcgtttacttataacaacaacgtaaggttattgcgctatgcaaacacaaatcaaagttcgtggatatcatcttgatgtttatcaacatgttaataatgcccgctatctggagtttctggaagaagcccgttgggatggtctggaaaacagcgacagctttcagtggatgacggcccgcaatattgcctttgtggtggtaaacatcaatataaattaccgtcgcccggcggtattgagcgatctattgaccgtgaccagccaggtacaacagcttaacggtaaaagcggcgtattaagccagacgattacgctggagccagaagggcaggtggtggccgatgcgctcatcacgtttgtttgtattgatttaaaaacgcaaaaagcgctgccgctggaaggcgaattgcgtgaaaagctggaacagatggtgcaataacgcttcgcagtctgatggcgttgaacttgtccggcctggagatattgaccatggtgaatatctccaggccggataaggtgcgtgcgccgccatccggcaaaacaatcaccttaacccggttttttgcttcattgctgccatcaccgccgctttattcgacagataatgattcaggccgttagcgcgcagattacaggctgcgcaatgaccacagccatcgcctttaatgccgttatagcaggtcagcgtctcttcgcgaaccaaatccagttggccccaataatcggccagcgcccaggtttcagctttatcaatccacattaagggcgtttcgaaacggatatctttcgccatgcccagattcaccgcgtgattcagcgctttgacgaactcatcgcgacagtctggatagccggaaaaatcggtctcgcaaacgccagtgatcaccgcttcggctttaacctgataagcgtaaatcgccgccagcgtcagaaagagaatattgcgtcccggtacgaaagtattggggataccgtcagcgttcggttcatagtccggcaccggaatgctatcccgcgtcaggctgctgaccgccagttcgttcagcaaagtgacatccagcactttatgcgcgcgtgcgccaagttttaacgccagcgcccgcgcgacatcaatctctgcgcggtggcgctgaccataatcaaacgtgacacaatgcacttcatcatactgatgccgcgcttgcgccagacaagtggtggagtcctgacctccactaaatacaacaacggcgcgtttcatagttatcctgatcaatgacgaaagccaatatggtaacgcgtacggataatcccgaccagcttcttcacggcgaaggcggcggaagccaggcttcgctaaattcaaaccagccgcgaggggtgagtcgaacgccgttaacgcccggtggggcgctgatgcgatagtgataattaaatagtggcgtaagtgtggcgtcatccatcaggttagcaaaaacttgttgtagcgcggcgcggcgatctttttcattgggctgaatttgcagagcgtcaagcgtagcctgcagatgggaaaacgcaggcgcgtccaggacatgtgaccagatctgatcgcaacgtagccactgctccagcgtatattccggcgcttcgccgatcagcctgtcgcccatcatcagatccgcttgcgccaacgcagggcagttatcccagtttttggcattatgaaaaatcaacgttaactcacagccgagcgtcgccaggtaatgtcgaagctgttccgccatcgtatgcagctctacgggaaggtgatacgccagggtaagttttttcggcaatggcgtttcatcaacgtcctgccattgcgggattgtccagccgggtagcagcccctgacttggcataatcaagttctcatctaccggtaaggttttcagcagcgaagtatgatggataatatgtatcagacgccgcgcctgctgtacgttgagccgtgagccctttttgagggttaaataacaaaagccaagactgataccactacttacctgactcagcgtcgccagctcttccggtttgccgatggcaatctgcaccggatggcggcaactggtgcccagatcctgggcaaacagttgcggggtgatccagaattcaatcgctttcagcagcggatggctgaggtgataatggtcatgactttccagacgcaccagttccggcgtgaacaacgccaggcgaaaaggaccggtgccgataagcggcaggtcaggatgcgccagaccgctacaatagctcgccagacgatgcgccagccagtaatcaggtcggtgaaggagaaaggtcaggcactgaggatgcgttacttcgatccgtgcgacgctaataaacaatttgcttagcgcgggtagggtaagcagcctttccaggcgttcgtgtagctgcgcggtatccaccgcatcgccattatgccagtgcagcgtggagcgaatataaaaatcccagcgtaaaccgtcggcggaaacctcccagtgatgcgccaaatccccgcaaggatattgactgtcgcggtcgaagcgcgttaacccggaaaaaacttgccctgcgagatgctgttccgcgcggcctggcaggaaacccggctgcagcggatcaagcggacgatagtagggaatacgcaatgtcggcgtatcgttttgccattggccgcccataaaaggctggagcatcgcccgtaactcgcccggcgccagctgcgccagttccagtacgttgagctgctgccctttttccagcgcctgttccatcatggcggtgcggagcgattccggcgtgaccagaaactggagccgtccacgtttcccgcgcccggactgcgcctcccatcttagccaacctgcctgctgggcctgacgcagcagcgttcgcagatggcgctcgctacaaaaacagcgttcggccagttcgctaacggtgacatgttgcgtttccccggcggaaggctgccagaggcgttgatattgattaagccgattcagtagcctcatagaaacccggaacacttccttttatctgttcactattacttccgtatatctcaggtaatactgaacaacaagttaaccgcgtcacagtgtggagaaagagatggcccgtctggcagcatttgatatggatggcacgttattaatgcccgatcaccatttgggtagagaaacgatcgccacgctggcgcgtctgcgcgaacgcgatatcaccctgacattcgctacgggtcgtcatgtgctggaaatgcggcatattctggggacgctttcactggatgcttatcttattaccggtaacgggacgcgaattcactcgctggaaggcgacgtgctgcatcgtcaggatctcgatcctcaggttgccgatacggtgatgcaccatgcctgggatacccgagccagtatgcatgtgtttaatgacaacggctggtttacaggccaggagatccccgcgctactccaggcgcacgtctacagcggctttcgttatcaggttatcgatataaaaagcattccggcccatcaggtgacgaagatctgtttttgcggcgatcatgacgatctgatccgtttgcgcattcagctcaatgaggcgctggaagaacgcgcgcacctctgtttctctgccgtcgactgcctggaagtgctaccgctggggtgcaataaaggatcggcgctggcggtattgagcaaccatttagggctttcactggcagattgcatggcgtttggcgacgcgatgaacgatcgggaaatgctgggcagcgtcgggcgggggctcattatgggcaatgccatgccgcagcttatcgccgcgctgccacacctttcggttatcggacattgtggtaatcaagcggtatcacactttttgacgcattggctggacaatccgcatctaccttattcccccgaatgagagatctcttccagcaagccagacattcagtctggcttttttttggtttctagtcgccggtaagtaattttgcgatggccgctgaccacggcgtcaaatcgccgatatggtcgctaacccaggccggatggtaataggtatccagatagcgatcgccgctatcgcacaataacgtcacgatagcgccggtttctccagcctcgcgcatccgggccgcaagctgcagagctccccacatattcgtgccggtagaggcgccgactttacggcctagctgcgtttccagccagtgtgcggtggcaacgctggcggcgtccggcacgcgcagcatctcatccacgacatccggaataaaagaaggctctactcgcggacgaccaattccttcaattttactgcctaccgggctgcgtaatgaagcgtcgcgatcctgccagtaaggtaaaaagacggaattttccggatccaccaccatgagctgagtatcatagccctggcagcgaatatagcgcccaatcgtcgcagaggttccgcccgttccggcgctcatgacgataaatcgcggtaccggatggagttcgttgcgcatctggcggaaaatactgtcggcaatattattgttgccccgccagtcggtagctcgttctgcgtaggtaaactggtccatatagtgaccgttcagttcatgcgccagccgctcggaggcggcataaatttcgcaggcgctctccacaaaatgacagtggccgccgtaaaattgaatctgttcgattttacgttttgcggtacaggcgggcatgacggcgatgaacggcagtcccagtaaacgcgcgaaccaggcttcggaaatcgccgttgagcctgatgacgcttcaataatcggagtgccttctttaatccagccattgcacaacccataaaggaacagcgagcgcgccagacgatgcttgaggctaccggtgggatgcgtgctttcgtctttcaggtaaagctggatacctggaaatgccgacaggggcaaacgaataagatgcgtatccgccgagcgctggtggtcagcgttaatttcattaatggcatttttaacccaattgctactcatcattaatatccatttatcattttgtgccaagagtagcgaaaagtacggaaaaaattgttgctatttgacctttaaattacaatgtaaggagaaaaatattctctatggagtgggtatgttagataaaattgaccgtaagctgctttgcttattgcagcaggattgtaccctctctttgcaggcgctggcggatgccgttaatctgacgacaacgccttgctggaagcggcttaaacgcctggaagatgacggtatcctgcttggcagggtcgcgctgctggacccggaaaaactggggctgggattaaccgctttcgtgttgataaaaacgcagcaccacagcagtgaatggtactgtcggttcgtgaccgtcgtctctgagatgccggaagtgcttggcttctggcggatggcgggggaatacgactatctgatgcgagttcaggtggccgacatgaagcggtatgacgacttctataaacgtctggtcaatagcgtcccaggactgtcagacgtcacctccagttttgcgatggaacagattaagtacaccacctctctgcccattgaataattctcccggtattgccggaaatcatatcaggaaataacgcgtgcgattatttgctcaattaagctggtactttcgccgggaatggcgtcgctatcttggcgcagtggccctgcttatgcttattgcgatgctacagctaatcccgcccaaagtggtggggattgtcgtggatggcgtaaccgcacagcagtttactccaggccgaatagcgatgtggattggcaccattgccctgatcgccgtagtggtctatttgttgcgctatgtctggcgcgtgctgctatttggcgcctcttatcaattagccgttgaactgcgtgaagattattatcgccagttgagtcgtcagcatcctgaattttatcagcgccatcggacgggcgatcttatcgcgcgtgcgacgaatgatgtggatcgcgtcgtatttgcagcgggcgagggcgttctgacgctggttgactcgctggtaatgggctgtgcggtactgattgtcatgtcgacgcaaattagctggcagctaacgctattagcgctgttgccgatgccgattatggcgctgatgatcaaacgttacggcgatcggctgcatgattatttcaaactggcgcaggccgccttctccagcctgaacgaccgcacgcaggagagtctgaccagcatccgcatgatcaaagcgtttggtctggaggaccgccagtcttcgctgtttgcggcggatgccgaagataccggcaagaaaaatatgcgcgtggcgcgtattgacgcgcgttttgatccaaccatttacatcgccattggcatggcgaacctgctcgcgattagcggcggaagctggatggtggttaacggcagcctgacgctgggcgaactcaccagctttatgatgtatctggggttgatgatttggccgatgctggcgctggcctggatgtttaatatcgtggagcggggtagcgccgcatacagccgcatccgcgccatgctggcggaagcgccggtagttaaggatggcgaagagccggtcccggcggggcgcggcgaactgacggcggccattcgtgagttttgctatccgcaaacgacgcatccggcgctggagaatgtgaactttcgtcttaaaccgggtcagatgctggggatatgcggtccgaccggcgcggggaaaagcacaatattgtcgcttatccagcgccattttgatgtgacgcagggagagatccgattccatgacatgccgttgacgcatctgcaactggatagctggcgtagccgactggcggttgtcagccagacgccgtttttgttctcggactctattgcgaataatattgcgctcggacgcccggaggcgactcaggaggagattgaacaggtggcgcgtttagccagcgtacatgaggatattctccgcttgcctcagggctacgacacgcaggtaggtgaacgtggcgtcatgttatcgggagggcaaaaacagcgtatctcgattgccagagcgctactgttaaatgcggaaattctgcttctcgatgatgcgctttctgcagtagatggccgcacggagcatcagattttgcataatttgcgccagtggggcgaagggcgtacggtcatcatcagcgcgcatcgtttatccgcgctgaccgacgccaatgaaattatcgttatgcaacatggtcatgttgttcagcgcggcgatcacgatcaactggcgcagcagattggctggtatcgcgatatgtatcgctatcagcaactggaggccgcgctggatgacgcgccggaacgcggcgaggaggcggtgaatgcgtagttttggacagctatggccgacgctgaaacggttgctggcgtatggctcgccatggcgaaaaccgctctctgtcgcggtgatgatgctgtggattgcggcggcggcggaggttagcggtccgctgctgatcagctatttcattgataacatggtggcccgccaccatttaccgttgggcaaggtcgcggggctggcggccgcctatgtggggctacaatttctggcggcgggtctgcattacgcccagtctttattatttaaccgggcggccgttggcgtggttcagtccttgcgcacggacgtcatggatgccgccttgcgccagccgctaagcgccttcgacacgcagcttgtcggacaattaatttcacgcgtgaccaacgatacggaagtcatccgcgatctgtacgtcacggtcgtcgcaacggtattacgtagcgcggcgttgatcggcgccatgctggtcgctatgttcagccttgactggcggatggcgctggtggcgattttgatttttccggcggtattgaccgtgatgatcatttatcagcgctacagcacgccgattgtacgccgcgtgcgggcatacctggcggatattaacgacggctttaacgaaatcatcaatgggatgagcgtaatccagcagtttcgccagcaggcgcgcttcggcgaacgcatgggcgaggccagccgctcgcactacatggcgcggatgcagacgctgcgcttggatggctttttattgcgtccgctgcttagcctcttttccgcgctcattttatgcggtttgttgatgcttttcagctttacgtctgccggcacgattgaggtcggggtgctgtatgcgttcattagctatttgtcacgtctgaacgagccgctcattgaactgaccacccagcaatccatgctacagcaggcggttgtggcgggagaacgtgtttttgaactgatggatcgcccgcgccagcgctatggcagcgacgacaggccgttacaaagcggggcgattgatattgatcatctgtcgtttgcttaccgcgacgataatcttgttttacaggacattacgctatcagtaccgtcccgtagctttgtggcgctggtggggcacaccggcagcgggaagagcacgctcgccagcttattaatggggtattaccccctgacacaaggcgaaattcggctggatgggcgagaaatcgcctctcttaatcatcgcgttttacgccagggcgtggcgatggttcaacaggacccggtagtgatggcggatacctttctggctaatgtgacgctggggcgcgatgtctccgaggcgcaggtgtggcaggcgctggaaacggtacaactggcagatctggcgcgcggcctgagcgacgggctgcatacgcatctcggcgagcagggaaatacgctgtccgtcgggcaaaaacagctattggcgctggcgcgcgtgctggttgacgccccgcaaatattaattcttgatgaagcgacggccagcatcgattccggcactgagcaggcgatacagcaggcgctggcggcgattcgcgagcgcaccacgctggtggttattgcccatcggctatcgacaatcgtggaggcggataccattctggttctccatcgcggccaggcggtggagcgcgggacgcatcaacaattgctggcggcacaaggacgctactggcaaatgtatcaattacagttagttggcgaggagttagccgccagcgtacacgaagaacccggccctgcggcgtaaggtttggcgccacagggcaaaacctcgcccatcatgcaccgtcgtggtgcgtttttctttccctgtttcgattttggggcgcgtcaatataaagacgcgccgctaaccgcgcttttcctcgctcgccagcttctggcacatcctttgcaatatccattcagaagagtccatgcgcggcggcagccgttacctaattctgactggagggttctatgaagctggttaccgtgattatcaaaccgttcaagctggaggacgtgcgggaggcgctttcttccattggcattcagggactgaccgtcaccgaagtgaaagggtttggccgtcagaaaggacacgccgaactgtatcgcggcgcggagtacagcgtgaatttcctgccgaaggtcaaaattgatgtggctatcgccgacgaccaactggaagaggtgatcgatatcatcagtaaagcggcttacaccggaaaaattggcgacggcaaaattttcgtcgcggagctcatgcgcgttattcggattcgtaccggcgaagctgacgaagcagcgctgtaagacccgccacacagcaacaggaaatgaaaaaatgaagatagcgatgataaaaaccacactggcttcactggcgctgctgcctgggctaacgatagccgcgccggcggttgccgataaagcggatagtgcttttatgatgatttgcaccgcgctggtgctgttcatgacgataccgggtatcgcgctgttttacggcggattaattcgcgccaagaacgtgctgtcaatgttaacgcaagtgaccgtcacctttgcgctggtctgtattttatgggtggtgtacggctattcgctggcttttggcgaagggaatcattttttcggtaatgccgatggggcgatgttgaagaatatcgcgttgacggcggtaacgggtacgatttatcagtatattcatgtcgcgtttcagggatctttcgcctgtattaccgtcgggctgattgtcggcgcgctggcggagcgtattcgtttttcggcggtactgatttttgtcgtggtgtggttcacgctctcttatatcccgattgcgcacatggtgtggggcggcggcctgctggctgctcacggcgcgctggattttgctggtggtacagtggtgcatattaacgccgctatcgctgggctggtgggggcttatttaattggcaaacgcgtcggctttgggaaggaagcatttaaaccccataacctgccgatggtctttaccggtactgcgattctgtatatcggctggtttggatttaacgcgggttctgccggtagcgcaaacgagatagcagcgctggcctttgtgaacaccgtggtggcgaccgccgccgcgattctggggtggattatcggcgagtggacgctacgcggtaagccttccctgctgggagcgtgttccggcgcgattgccggtctggtcggcgtgacgccagcctgtggctatgttggcgttggcggcgcgctggttatcggcgttattgcgggtctggcgggattgtggggagtcaccatgcttaaacgtctgctacgggtagatgatccgtgcgacgtatttggcgttcacggcgtttgcggaatagtcggctgtatcctgaccggcgtttttgccgccagttcgctgggcggcgttggctttgtcgacggcgttacgatgggacatcaggtgatggtacagctggaaagtattgctattacggtcgtctggtccggcgttgtcgcgtttgttggttacaaactggcggatatccttgttggactgcgtgtaccggaagagcaggagcgcgaggggctggatgtgaacagtcacggcgagaatgcgtataacgcgtgattgcgcaacatgcctgatggcgctgcgcttatccagtttaccgtaggccggataagcgcagcgtcatcaggccattaacgccgcatagcggcatgttttttaattgtgattgcgcattaccccttcctgcacggttgaagcgaccagcgcgccatcctgagtataaaactcgccgcgaacaaagccccgggcgctggaggcggaagtgctctccacgctataaagtagccattcattaaaattgaacgggcgatggaaccacatagagtgatcgatagtggcgatctgaatgcccttttccagaaaaccgatgccgtgaggctgaagcgcgacgggaaggaaattcaggtcagaggcatatcccagtaaatattgatggacgcgaatgtcatccggaacggtgccgttggcgcgaatccatacctgacgcacaggcgcggcgacgtgacctttcaacggattgtgaaattcgacgggacgaatttccagcgggcgatcgcagagaaacttttctttcagaatcggcggcagtaaatgcgccagcgattgcgcgatttccgtttctgacggtagtccttccggcccgactaccgtcggcatggttttttgatgttcaaaacccggttccggcgcctggaatgaggcggtcatgtaaaagatgggtttcccgttctgaatagcggcaacgcggcgggcgctgaagctattcccatcgcgcagcacttctacgtcatagataatgggtttttggctgtcgcctggccgcagaaaataactgtggaatgaatgcaccagtcgcgcttccggcaccgtttctttggcggcatagagcgcctggcccaccacctgaccgccaaatacctggcgcagccctaagtcttcactttggccccgaaagagtccttcttcaattttttccagattcaataatgtcagcaaattattcagtgtctgactcatacatactctccaggtgacaacgatgccgaagcgaggtagggcagagtataacgcaattttgcaagtggtccgatgggtacaaaagtctgaataacagaccaattccaggcaaaaatgagtgacatgtgccacacttaatcacgttatgtttctgttaaccactcttccggcggggggaaaggcctgctggtgcattgatgataaggagaattgaatgaaactcgtgcacatcgtaagtggtttagcggttgcgatatctctggcggcctgcgctgataaaagcgctgatatccagacgcctgcgccaaaccctaacatgtcgattacagctaaccagtctactattcagcaacccaatgtttccggtaccgtctggatccgccagaaggtcgctctgccgccagatgcggtgctgaccgtgacgctttcagatgcttcgctggctgatgcgccgtctaaggtgctgtcgcaaaaagcggtacgtaccgaaggtaaacaggcgcctttcagttttgtgttgccgtttaacccatcagatattcaacctaacgcgcgcatcctcctgagcgcggccatcaccgttgataataagctggtatttattaccgatagcgtgaaaccggtgattaataatggcggcactaaagcggatctgacgctggtaccggtacagcaaacggcggtgcctgtgcaggccagcggtggtgcgacgacgacggttccatcgacttcgccgacccaggtcaattcgtcttctgccgttcctgcgcctacccagtattaatcctgcgccaaccctctccgttacggagagggttaatacacccagcgatagcgttgtaaatcgatttgtccgcttcccgacaccaccacgccttccgccagtaatgcctgacgttgccgctgtagatccggcccggtaagtgatattgcgccgtggcggttcaccacccgatgccatggtaaagtgctgccttccggcagacgttttaaaactccgccgacctgacgcgccgcccgaggcgaaccggcaagccgggcgacatcgccgtaggtcgtgacaaacccttccgggatcgaggcgacgatttgccagacgcgttgaggaaatgtgtcctgaatatccataatagaatcctgcgttaatgcttcaggataatctggaataaggggggaggaaagcccggatgcgcaagaaaccagcatccgatgcctgatgggttgcaattgcacgatatagcagtgataatgcgcctgcgcgttggttcacaacgctctcaatgggggctctgttggttctcccgcaacgctactctgtttaccaggtcaggtccggaaggaagcagccaaggcagatgacgcgtgtgccgggatgtagctggcagggcccccacccatttgtgcctctccacactgttcttttctgctgtgcgacgttatagccgctgttccgcccaaagaataaatgccgtagcgggtaggggtttactgtataaccagccctgaccataatgtacgccatgctggcgtagccactgttcttgcctggccgtttcgatgccttctgcgaccatcttaagtttgagcgttttcgccatttcaataatatgcggcgtgacgtttttatattccagcgcatcgacaaaagatttatcaattttaaggacatccacatccagattttgtaagtagctgaggctggaatagccggtgccaaagtcatcaatataaattgaatgtcccgcgttacggtatctggcgacaatgggcgcgctggttttcggatcggcgaactcgcgttccgttaactcaagcgcgatttgcgacggagaaatttggctacggttcagcagcgtgcttaacagcgtcggcaacgtttccgacgccagatcggatgcctcaagattgattgaaatatgttgttcgggatgggactttaaccaactccccatgtcttcaaaaacggtgtcgatgattagccgggttagcggctccgtgagcccggtttgttcagccagcgcgataaaaatttccggcgaaaggaaggtgccgtccgcctgttgccagcgagctaaggcttcggcaccgacaatttttccgctgctcagggagacaataggctgatagtgtacgttaatttcgcgattgtctatcgcatcctggagacggtggcggggcgactgtagtcgacgcaaaatacgcagaataaaggccgcggccagcagacccgttacgatgcccgccggtagccagataaacgcctgtcgataccagctcctttccagcggagcggtcggtgcccagcttacgatagtaatgcccatttccggaaaggggtggatagcatactgaatgcctcggttttccagccgcaggggcgtctcatggtgaatgagcggaagaatagcggggtcaaggttaccgctgctggcaaccacagtattgcgttcccggccaataatagcgacgtcaatcggccatgcgccaaacggaatcacatcgataaaggacgccgggtcgatcatcacgatatagctgtcgctcccgagtgccgccatatagcgttttatacccagatcgttttgcgccgtaaaccaggcgcgataaccgtcgcgagtgattttcatgggcggagggaacgcgggaatatggctctctttttcaagtgaggagcaaacgggaatcgaatttttaagatacagaacttcctggacataccgaaagctataagacacgcggcgcatggcgagtaaatgggcactgctgcagggctcgcctttaaaggaggcaatatgcgttaacgcggcttttgcctggtcactgaccctttctgtacgtagcgccacccgggacgagaagatatccagctcttcattaaacctcttttcaacttgacggtgcgccagccacagactcaatcctatcgggaaaaggacagacaggataagcactcccgttaccaggctgaccagatgtcgtgttgtcacagtgatgtccttataaacacagcgtagagaaagtatatccgatcgtaaatcgcgccctcgaatgataaagctattttatcgattttacagattcaggcgccaggctaacgcgttacgccacgttgcttttgccgccaggaagagatcgtgaatgtttaccggttgaaaaaggagcgttgatagcgtattttattgttatgttataacataattgagagggcgcaatgaaacctgatattcatcctgtataccgcaccgtcgtatttcacgacaccagcgcaaatgaatatgtgaaagtgggatcaactatcaaaactgaacgtgaaatcgaactggacggcgtgacatatccgtatgtcactattgatgtgtcatcaaaatcgcatcctttttataccggtagacagaaaacgtttgatagcgaaagtagcgccgcacgcttccagaaacgtttcggtcattttatcggcgctaaacgggggtaaatgaaatgcaggtgttaaactcacttcgcaatgcaaaacaacggcatccggattgccagatagtcaaacgcaaaggacgcttatacgtgatttgtaaaacaaatccgcgttttaaggcggttcaggggcgtaaaaaaagacgttaaaaaaccaacagttcagggaaagcagtgcgtaccagggagggtgcgcacttttttattaccggctggcttctgcgcgggccagcgtaaaaatatcgtagaaggaaagttcgcccttacgggcaaccattttttgcagctggactttatgttcattatccacctgtggagactgaagaatcgtctcaatgagcgtggggggaacaaagcgggtgttgtaccattcgccgttgtaacagacccggaggtccagcacatcgatgtcgttatagtgataacgcggggcgatgtcgaaaaagaagaagccattaaatgcgataaataacaccactaacagccacactgaccccaccagcgtttctgattgcagcatgaccgccagcgtcgcaaaccaggctgcatacatcgcgataaataacccaggatgcttgcggataaaactgatactaaaacgcggcctgttatcgcgtttttcacggatgtttaagtcatcaatagtttcgctaagcaggcgctgtatctctgtcatcttttgccttcatgatttctgcgacataggggtagtaacagcccattttaaagggaggtgtaacgtgaaaaaagtaacagattaaccacgaattagcataacagttatcattttgactacaattttttaatgattcgcgccggatttccgcctaccacaacgtctggcggtacgttttttatcaccacagcgcctgaagcgacgacgacgttatcgccgatggttacgcccggattaacgacggctcgtccgcctatccagacattatttccgatagtgacgggtttacctaattctctgccgctgttgcgttcgacggcgtccagcggatgcgtggcggtatagatatgtacccctggcgcgagcatacaattatcgccaatatgaattgggcaaacatcaagcatgacgcagtcgaagttagcgtaaaaggagtgaccaagaaaaatattatagccgtagtcgcaacggaaggaaggttcaatataggcgtcttcgcatcgacccaacaggtcgcgtaaaatcgcctgacgcttatttatttcatcaggcgtagtataattgtattgatggatgagttgacgcgcccgcagtcgatcctggcataaagtttcatcggtcgggcaatacagtgccccagcgatcattttttgtttttcgtcactcatcgcgcgctccccttggtggatattatcgcaatagaagcaataataaagtattagagggaacgttccctgctattgctatgtgatctatatcactgttctataatagcccgttgtgttattagccagaacgaggaggcagataacacctgcgtgttctctaaaaagtaatgtagcgtgattaacgaatgaatttccatactgaagaggggatcttgtcgtagagtttgttcatcgtcaattctgcaagacggtgatccgcagctgagtaaaatacagccagctcattgtcggacaattcatatttatttttctcaatgacgcgctccagagtgtcaattgtctgacagcgccgtaaacgcatcaaataatcagttttagttaatggtttatcagacataaattctacctatgattgtaataatttttaacaagacaaactaacaggattggccctggtggcgttgacgaaacaacggaacaggcggttgcccgatttacgccatttttgcaaatcctgcgtattaataccatagctgctgaacaacataaaggtgtcgtccaggtattcatctatctgcgcaatcaatttattgtcttcattgtacttaattttataattaagcgcgaaagttgcaatatgctctatcagctcattgagctgcaggttgactgctgaggtcgggtcattaacccagccatggttgctttcttcaaggtttgcaagacagtcatgatacagggtttcgcaaagaaatttaagctgtgctatatcatgtcttttgggtgagtattcgtccataatgcatcccctttttagtggcttaaactaaccgaacaccttcgggatggatacaactaactaacctggtacttcccacgtcaccttatgatttaactataatctactctaaaaaacttttcatcgtcatattactaaaaattacaattgcgtgaaagccgcgtgttgccatactttttcgaattttaacagtgatcgtcggtcgcctaaaaaggaaccagttttattgtttgtgtaatcattgggttaacgttttttagcttttcaggctaaaacaatagactctgacaggagaaaatagccaggaatattcttaatatttcttaattaatggctgaattaagaaatggccaactttcctaagaaaagcctttaacgcagtaaggattataccttttattaatatggcaaaaaataatcaatctaacaataagcgtattttatgatttttgcgtaaaaaaggccgcttgcgcggccttatcaacagtgagcaaatcagcgatgttctgtcgaatgactatgctcaatatcttcgcttttacggctaaagcggcggcgtaccaccacgaagaagaccggtacgaagaaaatagccagtacggttgccgttaccatcccgcccagtacgccagtacctaccgcattctgcgcgccggaacccgcgccggaactgataaccagcggcataacccccagcatgaacgctaacgaggtcatcagaatcgggcgcaaacgcatccggacggcctccagcgtcgcttctaccagacctttcccttctttatccattaagtctttggcgaattcgacgataagtatcgcgttcttcgccgacaacccaatggttgtgagcaggcccacctggaagtaaacgtcgttagtcagtccgcggaaggtcgcagccagcagcgcgccgataaccccaagcggaacaaccagcattacggagaacgggatagaccagctctcatacaatgccgccagacacaggaagacgacgatcagcgatatagcatacagggcaggggcctggttgccggacaaccgctcctggtaggacatcccggtccagtcatacccaatgcctgacggcagcttgctggccagttcttccatcatcgccatcgcttcaccggtactcttgcctggcgccgcctgccccagaatttccatcgaaggcagaccgttatagcgttccagacgcggcgaaccatattcccagcgggaagaggagaatgcggagaatggcaccatctgaccatcgctaccacgaacgtaccagtcgttaatatcatccggcaacatgcggtatttcgcttcggacatcacgtaaactttcttcacacgaccgcgatcgataaagtcgtttacatagctgccgccccatgctgcgcccagcgtggtattaatgtcgctaatagatacgcccagcgcctgagctttttcctggtcgatatcgattttaaactgcggcgtatcttccagaccgttaggtcgaacgccgaccagcagatcaggatatttcgccacctcgccgaacaactgattacgtgcctgggtgagtttttcatgaccaagtcccgcctggtcaatcaactcgaagtcaaagccggttgcggtgcccagctcaacgatcgccggcaggttaaaggcgaagaccatcgcatctttaatttgtgaaaacgctgcggttgcccgctgggtaatcgcttcaaccttgtttttttcgcctggacgatcggcccagtctttcaacgacacgaatgcaataccggtattctgaccgcgccctgcaaaaccgaagccgttgacggcgaataccgattcaacgttggctttctctttgttcagatagtaatccgtgacctcatccagcactttttgcgtgcgctcttgcgttgcgcccgcggggagctggaccattgtcaggaatacgccctggtcttcatccggcaagaaagagcttggcagacgaacgaacagataagccataccgacgacgataatgagatagagcagcagataacgcccggtgctgcgcagaatattgcctacgctatcggtgtagtgatgcgtgctcttatcaaacaggcggttaaaccagccgaaaaagccttttttcccttcgccatgatcgcctttggcgacgggtttgagcatcgtcgcgcacagcgcaggcgtcaggatcagcgcgaccagcaccgacagcgccatcgccgatacgatggtgatagagaactgacgataaattgccccggttgagccgccaaagaaggccatcggaataaataccgccgacagtaccatcgcgatacccaccaatgcgccctgaatctggcccatggatttgcgcgtcgcttccttcggcggaaggccttcttccgtcataacacgttcgacgttctcgaccaccacgatggcgtcatccaccagcaagccgatggcgagcaccatcccgaacatcgtcagcgtgtttatcgagaaaccgaatgccgcaagcacggcaaaggttcccaacaacaccaccggaaccgcaatagtcggaatcaacgtcgcgcggaagttctgcaggaacaggtacatcaccaggaacacgaggataatcgcttcgaccagcgtttttaccacttcatgaatagagatcttcacgaacggcgtggtgtcatacgggtagacgattttcatccctggcgggaagaacggttccatttttttcagttcggcacgaatagcggtagcggtatccagcgcgttggcgccggtagccagtttgatgccaagacctgacgctggctgaccgttaaatttcgcaatgacgtcgtagttctcgccgccaagctcaattttcgctacatcccgcagacgaacctgggagccatcctgattcactttcagcaggattttgccaaactcatccgttgaggtcagacgcgtttgggcaataatcgatgcgttaagctgctggcctttaaccggcggcgtaccaccgagctgacctgccgcgacctgggcgttctgcgctttgatcgcgttaatcacgtcgaccggcgtcagttggtatttggtcagctctgtcggattcatccagatacgcatcgcatattgcgaaccaaacagctggacgtcgcccaccccagaggtacggctgatcggatctttcatattggcggcaacgtaatccgaaatatcctcctgggtcatggtgccgtcggtgttaatgacgcccactaccatcaggaagctacttgaggacttctcaacgctcacgccctgttgctgtacttcctggggaagtaacggcattgccagttgcaacttgttctgaacctgaacctgcgcgatatccgcatcggtgccggattcaaaggtcagcgtgatctgcacggtccccgtggagtcactgttggaggacatatacatcaggttatcgataccgttcatattctgttcgataacctgcgtgacggtatcctgtaccgttttcgcatcagcgccagggtaggttgcggagatcgtcactgctggtggcgcaatcgtcggatattgcgctaccggcaatttgaggatcgcgagcccccctgccaacatgatgatgatggcgatcacccacgcaaatatagggcgatcgataaagaaattaggcatgtcttaacggctcctgtttaagttaagacctgggctgagcaggttgatcaccgcttgcggcttgctgtttgttatccgcggtaatttcctgtactttaacctgtgcgccaggacgtactttttgcagcccgctgacgactacgcggtcgcccgctttcaatccgtcagtcaccagccacttatcgccgatcgcctggcttgcgacgatttggcgggtttccactttgttatcagcgccaaccaccagcaccgtggcatcgccgcgtggagtacgggtaacgccctgttgtggaaccagtaatgccgtcggttttgtcccttcctgcagacgtgcgcgaacgaacattcctggcaataaggtgtgatccgggttagggaagatggcgcgcaaagtaatagacccggtggtttggtcaacggtcacgtcggagaactcaagcgtaccggactgcgggaatttgataccgtcgctggtcaccaggtcgaccttcgctttgccgttttcctgtttcagcgaaccatttgccagctcctgcttcaggcgcaggaagtcattgctggactgggtcacatcgacataaatagggtccagctgctgcactgtcgccagcgccgacgcctgaccgttctgtaccagtgcgccttccgttacggatgacttaccaatacgaccgctaatcggcgaggtgactttggtatacgccaggttgatacgtgcggtttcaacggcggcttttgctgcgacaacagcggcagtcgcttgttgtgcgtcagccagcgcctgatcgtattcctgcttactgatgtactgcgtacccagcagcttttgataacgcttcaccgtcagttcagcgatattcgcggcggcctgcgcttttgccagatcgcccttagcgctgtcgtaagtcgcctggtaggtcgcaggatcaatctgatagagagagactcccgcttcgatatcacttccctcaacgaaattacgcttcaggataatgccgcttacctgcgggcgaacttcggcgatacggtaagcaacggtacgacccggaagttcagttgtgatttgcagtggttccgtttttagtgtgacaaccccaacttctggcatctgctggccgccttgctggtcctgtttgtcgtcacatcctgttagcgctaagctgcctgagagcatcagaacgaccgccagaggcgttaaccctctgtttttgttcatatgtaaacctcgagtgtccgatttcaaattggtcaatggtcaaaggtccttaaacccattgctgcgtttatattatcgtcgtgctatggtacatacatccataaatgtatgtaaatctaacgcctgtaaattcaccgacatatggcacgaaaaaccaaacaacaagcgctggagacacgacaacacatcctggatgtggccctgcgtttgttctcgcagcaaggcgtatcggcaacctcgctggcggagattgcgaacgctgctggcgtgacgcgcggcgcaatctattggcatttcaaaaataagtcggatttattcagtgagatctgggagctatcagaatccaatattggtgagcttgagattgagtatcaggcaaaattccccgacgatccactatctgtattaagagaaattttagttcatattcttgaagctactgtaacagaagaacgacgccgcttattgatggagattatattccataaatgtgagtttgtcggagaaatggttgtggttcaacaggcgcaacgtagcctttgtctggaaagttacgatcggattgaacaaacgttaaaacattgtattaatgctaaaatgctgcctgaaaatctgctgacccgtcgtgcggcgatactgatgcgcagctttatttcagggctcatggaaaactggttatttgctccgcaatcgtttgatttaaaaaaagaagctcgcgcctacgtcacgatcctgctggagatgtatcaattgtgtccgacgctgcgcgcgtcgacggtcaacggctccccctgataatattccaggaaaactcctggacattttctgtgtcgctattctgtttgttacaggcgtgatattcttgcgactcaattatttccggtctgcttgccggttcagacacttcattctcatgactatgttgcagctttataaacgttcacagcattttgtttttattacaattagcgtccttattatcctgctgtcctgtcagtctctggcatttgcccgggggcaaacgaatggcgacctgccgtcaaaagcggatgtgcaaaaccagctggatacgctgaataagcaaaaagatctctccgcccaggataagctcgtccagcaggaccttattgatacgttagctacgctggagaaaatcgagcgggtgaaagaggagaccgtacagctacggcagaaggtggcgcaggcgcctgaaaaaatgcgtcaggcgacggctgcgttgaatgcgctgagcgacgtcgataatgatgatgaaatgcgaaaaacgctgagtgcgctttcgctacgtcagcttgagctgcgcgtggcgcaggtactggatgatttgcaaaattcgcaaaacgatcttgccgcttataacagccagcttgtttcgctacagacccagcctgagcgcgtgcaaaacgccatgtataccgcctcacagcaaatacagcaaatccgtaaccgtcttgacggcaataacgtcggcgaagctgcgcttcgccccagccaacaggtgttattacaggcacaacaggcgctgcttaatgcgcagatcgaccagcaacgcaagagtcttgaaggaaataccgttttgcaggacaccctgcaaaaacagcgggattacgtgacggccaacagtaatcgccttgaacatcagcttcaacttttacaggaggcggtcaacagtaaacgacttacgctaacggaaaaaacggcccaggaggccatttcgccggacgaaacggcgcgtatccaggcaaacccgctggtaaaacaggaactggatattaaccatcaactcagccagcgtctgattgtcgcgaccgaaaacggcaatatgttgatgcagcaaaacattaaagtaaaaaactggctcgatcgcgcgctgcagtcggaaagaaatatcaaagaacagattgccgtcttaaaaggcagcctgttgctgtcgcgtattctttatcaacagcagcaaactctgccctccgccgacgaactcgaagatatgaccaaccgcattgcggatttgcgtctggagcagtttgaaatcaaccagcagcgtgatgccttattccaaagcgatgcctttgtcgacaagctggaggaggggcataccagcgaggtgaatgatgaagttcatgatgcgttgcttcaggtggtggagatgcgccgtgagctattggatcagctaaataaacagttgggtaaccagctgatgatggcgattaacctgcaagttaaccagcagcagttgatgagcgtctcgaaaaatctgaaagccattttgacgcagcagattttttgggtgaacagtaaccgccctatggactgggactggcttaaagcgttcccccaaacgttaaaagagcaattcagcgccatgaaaatcacggtgaactggcaaaaagcctggcccgcggtatttattgcttttttggccgggttgccgctcttgctcatcgccggtttaatccgctggcgtctgaaatggttaaaagcgtatcaacagaagctggccgccgccgtgggatcgctgcgtaacgatagtcagctcaatacgccaaaagctattctgatcgatctgatccgcgcgctgccggtgtgcctgattatcctcgcgcttggactgatcctgctgaccatgcagctaaatatcagcgatctgctctgggcctttagtaaaaagctcgcgatgttctggctggtctttgggctgtgctggaaggtgctggaaaaagagggcgtggcgatacgccattttggtatgccggcgcagttgaccagccactggcgtcgccagattgtacgcattagcctcgcattgctgccgctgcacttttggtctgtggtggcggagttgtcgccgctgaatctgatggatgacgtgctggggcaggcggttattttcctcaatctgctggtcataacattgctggtgtggccactgtgccgggaaagctggcgcgataaagaatctcacggcattcgactggtgaccgtgacgattctttccattattccagtggcgttaatggtattaacggcgaccggctatttctataccaccctgcgcctggcggggcgctggattgaaaccgtctatctggtcattatctggaacctgctttatcaaacggtgctgcgcgggttaagtgtagcggcgcgccggattgcctggcgacgcgcgctggctcgtcgtcagaacctggtaaaagagggtgcggaaggcgcggagccacaggaagaacccaccatcgcgctggagcagattaaccagcaaacattacgtatcacgatgctgctaatgcttgccctgtttggcgttatgttctgggcgatttggtccgatttgatcaccgtattcagctatcttgatagcattacgctgtggcactacaacggctccgaagctggcgctgcggtggtgaaaagcgtgacgatgggcagcttgctatttgccattattgccgcgatggtggcctgggcgctcatccgcaacttacccggcctgctggaagtgctggtgctttcacgcctgaatatgcgccagggggcttcgtatgcgatcaccacgatccttaactacgtcattatcgctgttggcgcgatgacagtattcggatcgctcggcgtctcgtgggataaactccagtggctggcggcggcgttgtcggtgggtctcggctttgggctacaggagatcttcggtaactttgtctcgggtttaatcatcctcttcgaacgtccggtacgcattggcgatacggtaacgatcggcacctactccggcacggtcagtaagattcgtattcgcgccaccactattaccgattttgatcgtaaagaagtgatcattccgaacaaagcgttcgtaacggagcggctaattaactggtccctctccgataccacgacacgtctggtgatccggcttggcgtggcttatggctcggatctggagaaagtgaaaagagtcttgctacaggcggcgatggagcatccgaaggtgatgcacgatccggaacctgccgtattcttcaccacctttggcgccagcactctggatcatgaactgcgtctgtacgtgcgtgaattgcgcgatcgtagccatacggtggatgaactgaaccgcgcgatcgatcgactgtgccgtgaaaatgatatcaatatcgcctttaaccagcttgaggtgcatctgcataacgcgaagggcgacgaagtcactgaagtgaagcgcgatctcaacggcggcgatctggcacctacggcaagctaaaaggcggtgggccgcgcgctttatgagtgcgcgcggcgccgctaatgcgaaagcgtagaaagctcttccggcgtaatgccggtgacgctggcgatgagcccgggttccagcccgttggcaagcattttgcgggcaatagcgcgcgcttcggcctcacggccttgtgctaacccttgctcaaggcctttttgcaggcccttttgcaacccttccgttcggcctttttcttccagccattccgctattgtcatcagttgttccttatactgcggcgcgccctgcgccagttgacgaattagcgccccgggttctgcggcgtttcctgctttcaacatatagttgatcagcacactgagctgcgcgtccgtcaaatgatcctgcgttaaaagcgtgataagggggtcgagcagttcgcttaaatcgcgttgacgaatatgtttttgcaggagctctaacatcgctatccgccgatgctgcaaaagctgattatccggcattgtcgtcaggtcgaccagcgcaaaatcgcggctgtataaggccttcgccatatccggtttcacaaacatattatgccagttaaggctatagggccacgggctttccggaccgtgataaaaaaggattggtaccaccagcggcaaggtatcatgaccggcatccagatgacgctgcatggcggcaatggcgtaacgcatcaggcgaaaagccatcagccggtctgatttgctctgatgttcaatgagcgcgtaaacatacccggggccgtgttgggtatgcagagagtagagaatatctgaatagcggctgcgtaaattgtcttcaacaaaactccccgactccagcttcagtgaatccagatcgcagattgcaagaaagtcttctggcatgtggatagccagaaagtcgcgggcgacctctttttgcatcagcatctgtcgaaataccgcatcgtgcggcgtggtgggtagacgttccatgccccgtcctttgttgcctgactgtagcgaccactctgtcagcgacaacgaggacaaaccagcgggcaattactctgtttgcgagtcgtcttccgtactttttaacttgttttcataatcacgcataactatttccagcgcgcgtagcaccgttcgtgccggtaagcgattctcttcaagcagcacaattaaatccacggccagtttgacttcatcaggggcattttcaagcgacatactttctccagggttagcgggttaaacgcgccagtacgttttctattttctccagcgcatgtcggcaacgcgccagccgtccttcatagatctcgacttccttttgcagcgtttgttgttcgacaaggccggtcgcctgcgccagacgaattttgcgctcctgtgtcatcgccagtagtcgacgttcaaactcctgatgctgtattcgtctgcgctgccaacggccaagccctggcgcggcggcgtcccactggcgcagcgaccaggcggcggtttcacgcgatatcgcctccagttgcgaagccagatgttccgccagccaggcgacttgcggcagttgctcatgttttaccgcctgacgcaacgcgacgagattggcgcctgcctcttccagatatccctgcaacagagtactgcgggtacggaaaaggtgtcggtcaaagcgcgcgcttaacgtcgcatgttgcgccagcggcgcgcagcgttggcgtagcgtcgccagcctctcttccagcgtctgtaacagcatagcggttttcaattcaacaccccgatgaaaataagacaggctgtgctacagtagccttctgtttgataacgattcgcattatgcaacgtactattttaatcatcattggctggctggcggtagtattagggacattgggcgtggttttgcccctgttgccgactacgccgttcattttactggcggcctggtgtttcgcccgctcgtcgcctcgtttccatgcctggttgttataccgctcatggtttggcggttatctgcgccactggcagcgctatcgggccatgccgccgggagcgaaaccgcgagcgatcgcgttgatattgctgacctttggtatttcgctgtggctggtgaatatgatgtgggtgcgggtgctgctgttggttattttggcctgtctgctgatttttatgtggcggataccggtgattgatgaaaagcaacaaaagcgctgaagcacacgaatcgctgttgcaattgtcgttcacagccagtaaattcgaccgttttcgagcacaggcgcaggcggtcaaagagtaaccgagcgttacccctgaccgaaaagtattgcgccgtgagtaacaccgtacttagcaggcatatatccatgaccgcgactgcacagcagcttgagtttctcaaaaacagcatcaaaagcattcaggattacccgaaaccgggcattcttttccgtgatgtcaccagcttactggaagacccgaaagcctacgcgctcagtattgaattgttggttgagcgttataaaaatgcgggtatcaccaaagtggtcggcaccgaagcgcgtggcttcctgtttggcgcgccggttgcgcttgggctgggcgttggttttgttccggtacgtaaaccgcgcaaattaccgcgtgaaactattgccgagacctatgaattagagtacggcaccgatcagctggaaattcatgtcgacgcgattaaacctggcgacaacgtgctggtcgtggacgatctgctggcgactggcggcaccattgaggcgaccgtgaagctgatccgtcgtctgggcgggaaagtcaccgatgcggcgttcatcatcaatttgttcgatctgggcggcgagcagcgtctggaaaagcaggggattacctgttatagcctggtgccgtttccagggcattgattcaggctattcgcactgctattttagccagagagacaacctcgctgtatcggcgaggttgtgttagcattacccttctatgaatccaccttccagcgtttcagagcctgccaatgagttatcaggtcttagccagaaaatggcgcccacaaacctttgctgacgtcgtcggccaggaacatgtgctgaccgcactggcgaacggcttgtcgttagggcgcattcatcacgcatatcttttttccggcacgcgcggcgtcggtaaaacctctatcgcccggctgctggcgaaggggctgaactgcgaaaccggtattaccgcgacgccgtgcggcgtttgcgataactgtcgggaaattgagcaggggcgttttgtcgatctcattgagattgacgccgcatcgcgtaccaaagtcgaagacacccgcgacctgctggataacgtccagtacgcgcctgcgcgcggtcgctttaaagtctatctgatcgatgaagtccacatgctgtcgcgccacagctttaatgcgctacttaaaacgcttgaagaaccgccagcgcatgtgaaatttttactggcgaccaccgatccgcagaagctgccggtgaccattttgtcgcgctgcctacagtttcatctcaaagcgctggatgttgaacagattcgccatcagcttgagcatattctcaatgaggaacatatcgctcacgaaccccgcgcgttgcagttgttatcgcgtgcggctgacggcagcctgcgcgatgcattaagtctgactgaccaggcgatcgccagcggcgacgggcaggtttcgacgcaggcggtaagcgccatgctcggtacgctggacgacgaccaggctttgtcattagttgaggcggtggttgacgctaacggcgaacgcgtcatgtcgcttatcaacgaggcggcggcgcgcggtattgaatgggaagcgctgctggtcgaaatgcttagcctgctgcaccgtattgcgatggtgcaactttcgcctgccgcgttaggcagcgatatggcggctatcgagcaacggatgcgcgaacttgcccggacggtgcctcccggcgatcttcagctctattatcagacgttgttgattggtcgcaaagaattgccctgggcgccggaccggcggatgggcgttgaaatgacgttactgcgtgcactggcgtttcacccgcgtatgcccttgccggagcctgaaacgccgcggcagtcttttgcgcccgtggccccaacggcggtaatgacgccgccgcagctgcagcagccgtcggcgcccgcgccgcagacatcgccagcgccgctgccggcgtctaccagtcaggtgctggcggcgcgcaatcagctacagcgcgcgcagggagtaaccaaaacaaaaaagagtgaaccggcagccgcatcccgcgcgcggccggtgaataactctgcgctggagcggctggcctcggtttcggagcgcgtacaggcgcgcccggcgccgtccgcgctggaaacggcgccagtaaagaaagaggcttatcgctggaaggccaccacgccggtagtacaaaccaaagaagtggtggctacgccaaaagcgcttaagaaagctctggagcatgaaaaaacgccggagctggcggctaaactggcggcggaagcgattgagcgcgatccgtgggcggcgcaggtaagccagctttctttgcctaagctggtggagcaggtggcgcttaatgcctggaaggagcagaacggcaacgcggtttgtctgcatctgcgttcgacgcagcggcacctcaattccagcggcgcgcagcaaaagctggcgcaagcgctcagcgatctgacgggaacgacggttgaactgaccatcgttgaagatgataatcccgcggtgcgtacgccgctggaatggcgtcaggccatttatgaagagaaactcgcgcaagcgcgtgagtcaattattgcggataataacattcagacgctgcgtcgattcttcgacgccgagctggatgaagagagtatccgccccatttgatcgtaagcccggcttgcgattgtgaaccatcaagagagagagcttatgtttggaaaaggcggtctgggcaatctgatgaaacaggcccagcagatgcaggaaaaaatgcagaaaatgcaggaagagattgcgcagctggaagtgaccggcgaatccggcgcgggtctggtgaaggttaccatcaacggcgcgcataactgccgccgcgtggaaattgacccaagcctgctggaagatgacaaagagatgctggaagatctggtcgctgcggccttcaacgatgcggcgcgccgcattgaagagacgcaaaaagagaagatggcttccgtctcttccggtatgcaactgccgccaggctttaagatgccattctgatgcaaaccagtccgctgttaactcagcttatggaagcgttgcgctgccttccgggcgttggccctaagtcggcgcagcggatggcgtttaccctgttgcagcgcgatcgcagcggcggaatgcgcctggcgcaggcgctgactcgggcgatgtcggaaatcggccactgcgccgactgccgcacctttaccgagcaggatgtttgtaatatctgctcgaacccgcggcgtcaggaaaacggccagatttgcgtggtggagagtcctgcggatatctacgccattgagcagaccgggcaattttccgggcggtatttcgtgctgatgggccacctgtcgccgctggacggcatcgggccggatgatatcggtcttgatcgtctggaacagcggctggcgtcagaaaaaatcagtgagctgatcctcgcgaccaacccgacggttgaaggggaggctaccgcgaactatattgccgagctgtgcgcggaggccggcgtcgaagccagtcgtatcgcccacggcgtgccggttggcggcgaactggagatggtcgacggtacgacgctgtcccactcgctggcgggacgccataagattattttctgaacaaacggaggcggcattcgcggcctccgcttgaaatcacacccgcttgtccccatctcaccctcaacgtatttttaccattaaaaatggcattgttgaggtctatccacatgaaaggacaagaaacgcgtggttttcagtcagaagttaaacagcttctgcacctgatgatccattctctttattccaataaagaaatcttcctgcgtgaactcatctctaacgcctcagatgcggcggacaagctgcgtttccgcgctctgtcaaacccggatctgtatgaaggagatggcgagctgcgtgtgcgcgtctctttcgataaagataagcgtacgttgaccattgccgataacggcgtggggatgaatcgtgatgaggtgattgaccacttaggcaccattgccaagtccggcaccaaatctttcctcgaatcaatggggtccgatcaggcgaaagatagccagctcatcggtcagtttggcgtaggcttctactccgcgtttattgtggccgataaagtgaccgtacgtactcgtgcggcaggcgacaagccggaaaatggcgtgttctgggaatcggcaggcgaaggcgaatacaccgttgccgatatcaccaaaaatgaccgtggtacggaaatcaccttacacctgcgtgaaggcgaagatgaattcctcgatgactggcgcgtacgctcgattatcagcaaatattccgatcacatcgcattgccggtagagattgaaaaacgggaagaaaaagacggcgaaaccgtgatttcctgggagaaaatcaacaaggcccaggcgttgtggacccgtaacaagtcggaaattaaagacgacgagtacaacgagttttacaagcacatcgcgcatgatttcaccgatccgctgacctggagccacaaccgcgtggaaggtaagcaggagtacaccagcctgctgtatatcccgtcgcaggcgccgtgggatctgtggaaccgcgatcacaaacatggtctgaagctgtacgtacagcgcgtgttcattatggacgatgccgagcagttcatgccgaactatctgcgtttcgtgcgcggcctgattgattctaatgacctgccgttgaacgtctcccgtgaaatcctgcaggacagcacggtaacgcgtaatctgcgtagcgctctgaccaaacgcgtcctgcaaatgctggaaaaactggcgaaagacgacgcggaaaaataccaaaccttctggaaacagttcggtctggtgctgaaagaaggcccggcggaagatcacgccaaccaggaagcgatcgctaaactgttgcgctttgcctccacccataccgactcttccgcccagaccgtgtcgctggaagattacgtctcccggatgaaagaagggcaggaaaaaatctactacatcaccgcagacagctatgcggcggcgaaaaacagcccgcacctggaactgctgcgtaagaaaggcatcgaagtgctgctgctctccgatcgcatcgacgagtggatgatgaactacctgaccgagtttgacggtaaagcattccagtcggtcgctaaagccgatgaatccatcgaaaaactggcggatgaagtcgacgaaaacgcgaaagaagcggaaaaggcgcttgagccgtttgtggagcgtgtcaaaaccctgctgggcgatcgcgtgaaagacgtgcgtctgacgcaccgtttaaccgacacgccggcgattgtcaccaccgatgcggatgaaatgagcacccagatggcgaaactgttcgccgcggctggtcagtccgtgccggaagtgaaatacatctttgagctcaacccggatcatgtgctggttaaacgcactgccgataccaaggatgaagcgcagtttaaagagtgggttgagctgctgctggatcaggcgctgttcgctgaacgcggtacgctggaagatccgaaccagtttatccgccgtatgaaccagttgctggtgtcctgataacgctcatctgactgccggatggcgacgcgaagcgtcttatccggcctacggcgagtactgtttgtaggccggataagcgccagcgccatccggcattttttataataccttctcttttctggatttctcttcgttaaccgtttcagcatcaggcggcttccttgagcgaaatgcgtgatggtggtatcgtttagcgctttttaaaaaatatcgacaacctttgaggggattttcgtaatgcgtattattctgcttggcgctccgggcgcgggtaaaggaactcaggctcagttcatcatggagaaatatggtattccgcaaatctccactggcgatatgctgcgcgccgcagtgaaatcaggctccgagttgggcaaacaggcgaaagatatcatggacgccggtaaactggtgaccgatgaactggtgattgcgctggttaaagagcgtatcgcccaggaagactgccgtaacggttttctgctggacggtttcccgcgcacgatcccgcaggctgacgcgatgaaagaagcgggtattgtcgtggattacgtgctggaattcgacgtaccggacgaactgatcgttgaccgtattgtgggtcgtcgcgtacacgccgcctctggccgcgtttaccacgttaagtttaatccgccgaaagtggaaggcaaagatgacgtcaccggcgaagatctgaccacccgtaaagacgatcaggaagagaccgttcgcaaacgtctggtggaatatcatcagatgaccgcgccgctgattggctactaccagaaagaagcggaagcgggcaacaccaaatacgctaaagttgacggtacgcaggccgttgccgacgtgcgcgcagcgctggaaaaaatcctcggttaattttttcgcgtagtgaagcacttatcaggcctgctgttatcccgcaagcctgataagcgtaacgccatcaggcaatcggtgccggatggcggcctgaacgccttatccggcctactggcatcgttagcgccattcggcaaattctcgtcttacctctcgcagcaattagttcttctttatcgcttttccgctacaattatcaacaatttgaatagataagaggcggcaatgcgtcagacgaaaaccggtatcctgctggctaaccttggcacgccagatgccccaactcctgaagcggtaaagcgttacctgaaacaatttttaagcgacagacgcgtggtggatactcctcgtctgctgtggtggccgctgctgcgtggcgttattttaccgctgcgttcgccgcgcgtcgcgaaactctatcaatctatctggatggatggcggttcgccgctcatggtatatagccgcgaacagcaacaggcgctggccgcgcggttgccagatacgcccgtcgcgctggggatgagctacggctcgccctcgctggaaagcgctgtcgatgaactgttagcaagcgacgtcgaccatatcgtcgtgctgccgttgtacccgcaatactcttgctcaacggtgggcgcagtctgggacgaactggggcggatactggcgcgtaaacgtcgtattcccggtatctcatttattcgcgattacgcggatgacggcgcttatatcgatgcgctggcgaaaagcgcgcgtgagtcgttcgccaggcacggcgagcccgatgtgcttctgctctcctatcacggcattccacaacgttatgcggatgaaggcgatgactatccgcagcgctgccgcgataccacgcgcgaactggtttccgcattgggactgccgccggaaaaggtaatgatgacgttccagtcgcgctttggccgtgaaccgtggctgacgccgtacaccgatgaaacgctaaaaatgttgggtgaaaaggggactggccatattcaggttatgtgtccgggatttgccgcggattgtctggagacgctggaagagatagcggaacagaaccgcgagattttccttgaagcgggcggtaaaaaatatgcgtacattccggcgctgaacgcgacgccggaacatattgatatgatgctgaaactcacggcgccgtaccgttaacgcggcgtcttcatcctcgccataaagaagcgtgcgccgtcctgcaaggcatcgtcggcgattgtcatcattcgcgaatagtgcagaaaggcgtgcagcgtgccgggatacattttgtattcgcagggctgctggtgcgcctgtaatgtctggtgcagcaagcggctgtcatcaatgagcggatcaaactccgcgctggcaataaagcagggcggcacatcgcgcgtgagatcgttattaaacagacaataccagggcgattcccgatcttcatcgttacgcagataggccttttcgtacatgtccagatcttcacgcgtcaggccgtcccacgcgccgccgaacagacggcggcttaccgaatcttgcaacccatacagcccataccacaacagaatcgcgataacgttaccgcagcgaatgtgcttatcacgtagccagagcgcgctggcaagcgccagcatggcgcctgcggaatctccggcgaaaccgattttctccacgttgagcgagtattcatcggcatgttgagagaagtagctgcataccgcgacggtttcttcaatggcctgtggataacgcgcttgcggcgacagcgaataatcaatgccgatcacggtgcagccggtataacgcgccagcagacgcattatccggtcatgcgtatccaggttaccgaggataaatccgccgccgtgcagatagtataaggtggcctggctggtcggctgcggcgagtagagccgggttgttacatcgccataaggcgtagggacggcgcaggtgcgggtggtcatggacggcgcgtcggcattccagaaacggcgctcaagaagataatactgacgctgggtctcaatatcgccatcggcaggccaggggggaaggcctggttgctggaagtttacgacggctgtcatttcgtctgacagtcgggtgagtacgggaattttattttccggcttcataaaacgctccttgtgaaagtgaaccattgtaaaaaacgcggctggagaaactgcgatctcgtcgtccgatattgaaacgccatcgtccgtcgcgcgcagcagggggaatgtgctaccatgcagcgctccgttattcatccgtaagcacaatcatgaaatttcccggtaaacgtaaatccaaacactattttcccgtcaatgcgcgtgacccgttgttgcaacaaattcagtcagaacaggaaaccaacgcctcctgggtcgtcggtatcgaccagacgttggtggatattgaggcgaaagtggatgacgattttattacacgctatggattaagcgccgggcattctctggtgatagaagacgaggtggcggagaagctgtatcaggaactgacgcgggaaaatctgatcacccatcagtttgctggcggcaccataggcaatacgatgcacaattactcggtactggcggatgaccgttcggtgttactgggcgtgatgtgcagcaacattgagattggcagctacgcttatcgctacctgtgtaatacttccagccgtaccgacctgaattatctgcaagcggtagatggcccgattggccgctgtttcacgctgattggcgaatccggcgagcgtaccttcgctatcagccccggccatatgaatcagttacgggcggaaagtattccggaagcggtgatcgctggcgcttccgcgctggtgttgacctcatatctggtgcgctgtaagcctggcgaaccgatgcctgacgcgacgatgaaagcgatcgaatacgcgaaaaagcataacgtgccggttgtcatgacgctgggcaccaaatttgtgatcgccgataatccgcagtggtggcaggcgtttctcaaagagaatgtctcgattctggcaatgaatgaagaagaagcggaagcgctgaccggcgaaaacgacccgctgctggcggcggataaggcgctggactgggtcgacctggtgttatgcaccgccgggccgatagggttatatatggcgggcttcaccgaagaggaagcaaaacgtaaaacccagcatccgctgctaccgggagctattgctgaatttaaccagtatgaatttagccgggcaatgcgccataaagattgtattaatccgctgcgcgtttattcgcatattgcgccgtatatgggcgggccggaaaaaatcatgaacaccaacggcgcgggcgatggcgcgctggcggcgctgctgcacgatattacggcgaacagttaccatcgtagcaacgtaccgaactccagtaagcacaaatttacctggctgacctattcgtcgctggcgcaggtgtgtaaatatgctaaccgtgtcagttatcaggtactgaaccagcattctccgcgtctgacacgcgggctgccggaacgtgaggacagcctggaagagtcgtactgggatcgctaatctggcttgcccgatggcgctgcgcgcatcgggccgtccggcaaacccttaactggcgacgacttcacccgcgggcggcgtttcaagcagttccagcatcgcccgggcaatttctcgctcgcccatcactacctgattggctccccgctcggtaatatatttcacttcatcatcatagtgcgcgcgggcgattatctcgatatcaggactttttccccgcgctgaggcgacaatctcaccggcttcgtaaccgttggggatggtcaataacagccagcgagcgcagtccagatgcgccagattcatgatttcttcgttagcggcgttgcccagtacggcgcgaatcccgcgttcgcgcagttcatccacgcgggtacgggacgtttcgataaccaccagcggaatccccgccgccagtaatttttctcccagcagactgcctacgcggccaaaacccaccagcagggcatgattacagatatccaccggaatttgcttctcttcttcgatagcctcttccagagtttgctcttccagcgtttcggttttcgccagatacttctccagcagggtaaacagtacgggattaagcataatcgacaaaatagcgcctgccagcaccaggttctgtcccgcttgcggcagcaggttgagcgccatgccgagcccggcgagaataaaggcgaactcgccgatttgcgccaggctggcggcaatggtcagcgcggttcgcggcgagtggccgaacaaacgcaccaggaaaaacgcagcgatcgatttgccaaagacgataatggcaagcgtcgccaacaccgccagcggctgttgaatcaagactaacggatcgaacaacatgccgacggaaacaaaaaacaggacggcaaaggcgtcgcgcagcggcaacgtatcgtgcgccgcccggtgactcagttccgactcattaagcaccattccagcgaagaacgcgcccagcgcaaaagagacgtcaaacagttctaccgcgccaaacgcaatgcctaacgccagcgccagtacggaaagggtaaataattcgcgcgagccggtggcggcgctgcgggccataatccacggcaccaggcggcgtccgaccagcatcatgatggcgataaacgccaccactttaccaatggttatccccatatcgactgtcagcgaggctatgccgacatcgcctttttccaccatgccggcaacggcgggcagcaagaccagcgtcagcaccatcaccagatcttcgacaatcagccagccgatggcgatttgcccgcgctggctatcaaggagttgtcgctcctcaagcgcgcgcagcaggacgacggtactggctgtagacagacagagcccaaaaacgatgccggtcattaatgaccatcccagcacggcggaaagcgccatacccagcagcgtcgccaccgctatctgagcgacagcgccgggaatggcgatagactttaccgccatcaaatccttcagcgaaaaatgcagcccgacgccgaacatcaatagaatcacgccgagctccgccagctccggcgccagtttggtatccgcaacaaaacccggggtaaaaggtcccgccagaacgcccgctaacagatatcccaccagtggagaaatacgcaatttgttggcaatcatgccgagaataaaagcgagcacaaggccgccgacaatggtggtgataagcggggtagcgtgatgcattccgtctcctttggttgctggactccaaaactccgggtaatagtttatgacaatttcaatcaggatgtttataaaaaatggttgtgttttataaaaagatacgatctgaaggcaaaaagagcacggaacgtaaaagtgataagtatgggatggacaaagcaagatggcatcaggatgtacaggcggttaaagcgtacctttaaccgccataaaatcatgctttatgtcgattatcaggtaagaatatggtcagtatccccagaagcggcaggaaagcacagattttataaactaaatagatactggtatggtcggcaatcagccccagcaccgctgcgcccaggcctcccatcccgaaggcaaacccgaaaaacaggccggaaaccataccgatgcgtcctggcagcagctcctgggcatacaccagaatggcggaaaacgccgacgcgagaataaagccgataatcaccgttaaaatccccgtccagtacagcgtggcgtagggtaaaacaagggtaaacggcgcgacgccgagaatagagccccaaatcacatatttcctgccgattttatcgcccaccggcccgccgattaccgtcccggcagccaccgcaaacaggaaggcaaacagatggagctgcgcgttttgtattgataatccgaatttttgcatcagataaaaggtgtagtagctactgatgctcgccatataaaaatatttcgagaaaatgagtagcaataacacgctgaccgccagcacgactttattgcgcggcagcgggttagcgattatcgcttttggcttgcctttcgctatccggtgctgggctgcataccagcggctgatctgcgccagcaccacgatcgccagcagcgcggccagcacaaaccaggcgacattccctttgccatagggcgcgataatcacggcggccagcagcgggcccaatgaactgccgaagttaccgccgacctggaagatagactgcgccagaccatgacgtccgccggaggccatgcgcgccacgcgggacgattccgggtgaaaaacggacgagccggtacccaccagcgccgcagcgagcaatacgccgccaaaacttcccgccattgccagcagtaccagcccgctcagggtaaaacacatgccgacaggcagcgaccacggcatgggatacttatccgtccagtagccgacgaccggttgcagcagcgatgaggcgagctggaacgtcagggtgatcaaacctatctggacgaaggtcagcgagaactccgcctgcaacaggggataaatggctaagattagcgactggatcatatcgttcagcagatgggaaagactgatcgcgcccaaaataccaaacgaagtacgtgctttagcggccgctgcgggcgcgccggctaacggctgggttggttcactcatggccatagaaagtcacttaaattttatgcgatgttggagatagtaggatgtgtaattattacttgcctaacatacctgtgaaatgtgtttgaaggaagtctcaattctgaaaacatatttgtctattattgcaaggaaaggtaatttctgcggttgatattgagtcagggagagaaagatgaaatttttgaaacggggtgtggcgctggcgttactggcggcgttcgcgctgacgactcagcctgcacaggcttacgaaaaagataaaacctataaaattactatcctgcataccaacgatcaccacggtcacttctggcgcagcgaatatggcgaatatggtctggcggcgcaaaaaacgctggtggacagtatccgtaaagaggtggcgcaagaggggggaagcgtcctgttgttatccggcggcgacattaataccggggtgccggaatccgatctccaggatgcggagcccgatttccgcgggatgaatctgattggctacgacgctatggccgtcggtaatcatgaatttgataatccgctcaccgtattgcgccagcaggaaaagtgggcgaagtttccctttctttccgccaatatttatcaaaaaagtaccggcgagcgtctgtttaagccgtgggctatttttacacgccaggatataaaaatcgcggtaatcggcttaaccaccgatgacacggcgaaaataggcaacccggaatatttcaccgatattgagtttcgtaaacctgctgaagaagcaaaggtggtgattcaggaacttaatatgaatgaaaaaccggacgtgattatcgcgaccacgcatatgggacattatgacaacggcgatcacggttcgaacgcgccgggcgacgttgagatggcgcgtagcctgcctgccggttcgttggcgatgattgtgggcggtcactcacaagacccggtatgcatggcgtcggaaaataaaaaacaggtgaattacgtaccgggaacgccctgcgcgccggataagcaaaatggcatctggatcgtgcaggcgcatgagtggggtaaatatgtgggccgtgcggatttcgaattccgtaacggcgagatgaaaatggttaactaccagcttattccggtaaatctcaagaaaaaagtgacctgggataacgggaaaagcgagcgtgtactttacacgccggaaatcgcagaaaatccgcaaatgctctcgttattaacgccgttccagaataaaggtaaagcgcaactggaggtgaaaattggtagcgtgaatggccttcttgaaggcgatcgcagtaaggtcagatttgtccagaccaatatgggacgggggattctggctgcgcagatcgcgcgcaccggcgccgattttggcgtgatgagcggcggcggtattcgcgactcgattgaggcgggagatattacctataaaagcgtgctcaaggtacagccgttcggcaacattgtggtgtatgccgatatgagcggcaaagaggtggttgattatctcaccgccgtagcacagatgaaaccggactccggcgcctatccacagctcgccaatgtgagctttgtcgccaaagagggcaagctcaccgatctgaaaatcaaaggcgagcctgttgatccggctaaaacctatcgcatggcgacgctgagtttcaacgccacgggcggcgatggttatccgcgcattgataacaaaccgggctacgtgaataccgggtttattgacgcggaagtgctgaaagagtttattcagcaaaattcaccgctggatgcggcggcgtttacgccaaatggtgaggtgagctggctgtagcggtacggatagccatttctgcctgatggcgcgcaaccttaaggcctacggattatgtctgctgtaggccggataaggcgtttgcgccgctatccggcaatgtattttacgcaggcttaatcccgacgcgcgatatcagcgaatttagcacccaggatggcggccaaatcgtcagccgccagttcaatatccagcccgcgtttaccaccggaaacataaatagtggcaaacgtgcgggctggcgcgtcaatcagcgtgggcagccgtttcttctgtcccagcggactgatcccgccgaccagatatcccgtggtgcgttgcgccaccatcgggtcggccatatcgacctttttcgcgcccagagctttggcgacttttttcaaatccagctgtccggctacaggcgtcacggcgacggccagttgcttcatatcgccattcacggcgaccaaaagcgttttatacacctgatcggcgtttagcccgagcttacgcaccacttcatcgccaaagttagtttcattcggatcgtgatcgtaggtgtgaatgttaaacggaatcttgtttttttcgagtaacttaactgcgggtgtcataacgttccttcttactacagacgtgatttgccatcagcatacgcccgaaagcggactaaaaaatagtataatcttgtgcattaggtcttggcagttgcggcaactttgagcgacaatctgaagatccgaagcgaaagcgtcgggataataataacgatgaaattcctctttgacgggccaatagcgatattggccatttttttatttcaatatttgcggtaggttgccttcgccgtacagatgtagcgcccctacggctaccacgtagcgtcccggcggcagtgccagcagcgcgtcgcgccaggcttcattgcgtttcaccatcagtacatcatacagcggctggctaaacgttctggggagcgaagcgccgacgctggtcggcggctgctcaagccaccagccgatcatcacctgcaaaagccgtgcgttggtgtgccagtgcgtcagcgtgtcgtcgagcagcgccatcccgccatcgggcagatcgcagagtagttcgagctggtgtttcgccccttccagctcttgcaccggcagcgacatttcgcgggcagcctgtaatagctgataatcaatgccatagtccgggcgcaatcccagccgttgcgcctgcgtggcctgtagcaccatagctatctgccataaaggttgattatcaaaatggatcagcggcatacccaactcactgacccgtttttccagtgcgcttagctgcccggcgctgagacgttcgaccaacggcgggcatttggggagattgctgaatggcgtttcgttaccagaaatatccgcttcaacgaccagcgcgtcggcctggtgtagctttttcaccagctttgctggaagaggagccatatcgcgcgtccccatatgaatactgccaaccagatgcagatgacgaccgccgggcagggagagatcgatagcaggccaactatttggggtaccacgcagcgcgcgccataaacgtttaagttgatttaatagctccatacgcgctccctttgaaaaagctcatgctagcgcgttggagaaaagggcgcaatgcgccctgacgggacgtcaacgatcggtcgggttattcgctgccgtcgagataggccgttctggcgatggtcatttcaagctggcatttataaatactgatgcgcttttcagcgggtatggcctcggatttggcatcgctaagtttgccgcactgctgctctttttgggtcacccagactcgctgctcttgttttaatgccgttcgggcagaggcgggtagtgaattccagacctgattaagctcgcgatctctactttcaaatttctttgctgcgatttcaatcagtgagttattttttttctttataatgctatcaccagataccgtcattcttgccattacataaatagatcgcgccaatttatcggttttttgcacagaggtgacaacaatatctttgttgttgtctgctagctgaatattgtagttaacctgtttccaggtcaccgtattgtttattacctgtccatccccttgtgaaatatagaatagagtatttggtaagtctttcattaatttaaataatggctgaggaatacccatggcgacggtagccgagcaagttcgtaggttggcattttctgcttgagggttctgcgtgattacatcactgaattgaacaggaatagcccggagttgttgctcgtattgagtctgggggatatcgaagaaaagcgtggagggctctttaatatagtcttgctgtaaacgacctaatgcttcattgtaaatccattcttttgccgccgtgactgcattatcgttgccacattttaactctggagtggaatcaaataaccctgcataactgacggcgggagaaagcaggaaaagaagcgtaactgcttttctaaacataaataacacatccttatgattcaaaaaaacattataaaatgttgttttttatttttctacaggatgtgcggttaaatttttatatattgatacggtaaattactgatggcttaataatatatcaggcagctgatgctgcctgatatagcgtttttacgctttcggtttaaaacgcaatagccggttggcattgctgacgacggtaatggaagacagcgccattgccgcgcctgctactaccgggtttaacaaggtaccggtaaacggccacagaataccggcggccaccgggataccaatgctgttgtagataaatgcgccaagcaggttttgtttcatattgcgcaacgtcgcgcgcgaaatggccagcgcatccgccacgcccatcagactatggcgcatcagcgtaatcgccgcggtttcaatcgccacatcgctgccgccgcccatcgcgataccgacgtccgcctgcgccagcgcgggcgcatcgttgataccatcgccgaccatcgcaacctgacgaccctggctttgcaggcgtttaatcgcatcggctttgccatccggcagaacgcccgcaatgacttcgtcaatacccgcttctttggcaatcgcgttagccgtcgttgggttatccccggtgagcattaccagacggtatccggcgttgtgcaggcgttcaagcgcggcaatactatcgctgcgcaatggatcgcgtaccgccagtaacgccgccgctttaccgtcaatcgccagcaggaccggagtcgagccttgcgaggcctgcgcggtgatttccgccgtcatgtcatccgtggcgacgtgctgttcgttcagcaacgcctggttccccagaagcagttgatgaccttccgcttcaccgctgacgcccagtccgcgcagcgttctgaaaccgttcacctgcggcagtttatcatcgccggctttttccagaatcgcatgggccagcgggtggctggagccttgttcgagcgcggcagccagacgtaatgcctgagcttcctcaacgccgttaaaggtttttatcgccaccacttgcggcttgccttccgtcagcgtcccggttttatcaaaaacgagggtatccaacgtactggcgcgttgcagggcatcggcgtcgcgtaccagcacgccgaattcggcagcgcggcctacgccggaaataatcgacattggcgtcgccaggcctaatgcgcaagggcaggcgataatcagtacggtggtggcgatgaccagcgtataaacaatttgcggcgccggcccgaagaaataccagatagcggcgctgaacagcgcaatggccacgacgacgggaacgaataccgcggagattttatcggccagttggccaatttccggtttactgctttgcgcctggcgtaccatgcgaataatgcgtgacagcgtggtatggctgcccaccgcgctggcgcggaacaggacgctgccgtcctggacgacggtgccggcatgaacgctgtcgccttcgcctttttgctgcggaataggttcgccggtcagcatggcttcatcaagccacgcttcgccttgggtaatttcgccatccaccggcacgcgatcgccggtagtgagccgcagcagcatccctggctgaacgtccgccagcgggacgcttttttcgccgtcttctgtcacgacgcgtgcggtgggcggggtgagatcgagtaatttttccagcgcttttgaggaacgctgacgggcgcgcgcttccagcatgtgtccgagattaatcaaaccgataatcatcgcgctggcttcgtaatagaggtgccgcgcttccatcgggaaccactgcggccacaggttgacgctcatggagtagagccaggcaaccccggtgccgagcgccaccagcgtatccatcgtcgccgtgccgttcagcaggcttttccacgcgttacggtaaaagtgaccgcccgcaaagaccatcaccgcaagcgtgatcaggccaatagccagccacaggctgcggttgtcgtcggtcaccatcatgttatcgccgatcatcccccagaccatgaccggtataccgaccgcaagggcgacgattgcctgccaacgaaaacgtttcatggtggcgatggcggtttcctgctggcgctcgcggcgtttgatgtcatcttcaatcgcttctgcgccgtagccggctttttccaccgcctgcactaaatcagcggcggacgcgctgcccatcaccagcgcagtgcgttccgccaggtttacccgtgcctgcgtgacgcccggtacgctttgtagcgcatgttgtacgcgggtgacacaactggcgcagctcatgccgcttaacagcaactgttggctttcttcatcggccgtcgctaccggaagctcatgaggaaccgctgccagtgcttccgacgggattgatgactccgtcagcggtttagcctttgggtggcttaacgtcgcgccatacccggcttgtttgatggtttcaattaacgcgtccgcactggcggtaccggtaacgtgcgcttcggttacggtgacgtccgccagctcaacatccggacgttgttcaagactttctttcacgcgtttaacgcaatgaccgcaggacaaaccgtccagggtcaggtcgatagtttgagacatagtaaaaactcctttatgattggtcatcaattcattgaccttagtaatcgtagtgactcactgtgataaaggttaaaccttccagcaaggttaaggtcaagggggaaatatgaatattagcgatgtggcgaaaaaaaccggtttaaccagcaaagccattcggttttatgaagagaaagggctggtgacgccgccattacgtagcgaaaatggttatcgcacctacacgcagaagcatttaaacgagctgacgttgctgcgacaggcgaggcaggtggggtttaatctggaagagtgtggcgaactggtcaatctgtttaacgatccgcgacgccatagcgcagatgtgaaaaagcggacgctggaaaaggtcgcggagatcgagcgccatatcagcgagctgcaatcaatgcgcgatcaactgttggcgctggcggagagttgtcccggcgatgacagcgccgactgcccgattattgataatctttccggctgctgtcatcacaaggcgcaaaagccacgttgattaaacggcacgaatgcgtaaggtgatgccttccacggcgatcacttcgacatgcgtacctgcgcgcaggtcttcgtcagcgcataccggccacgagctgtcgccgacacgcatatgaccccgtccgttcactaacgcggcatcaagcataaaccggcggcctaccagttgttgtccgcgttggttaaggcggctgtcggtcggcttctgttcccgcacgcgacgcgccagccagcgccaccaaagccaggccgccagcaacgttaaggccgcaaacagcacgccctgccattcccagccgagcggtaagagccagacggttaagccggtaatcactgccgccacgccgctccacagcaaatagccgttaccgccgagcatttccgcagccaacaacaggccgccgaggctaagccagaagatatgcggatgcaccagaatcatcgctatcatgcttttttccgttcgctggcgctgtccttaaccagctcgctgatcccggcgatagcgcccatcagactgctggcatccagcggcatcatgaccactttgctgttattcgccgagccgatttgctgtaacgcttcggtgtatttctgcgccacgaagtagtttatcgcctgaatatccccggcggcgatggcttcagacaccatctgcgtagcgcgggcttccgcttcggcggaacgttcgcgcgcttccgcctgcaggaaagcggactgacgttcgccttcggctttcagaatctgcgactgtttttccccctcggctttcaggatttccgcctgacgtaccccttcggcctcaaggatataggcgcgtttggtacgttccgctttcatctgggcgttcatcgaggagatcaattccgcgggcgggcggacatcgcgaatttcgatacgggtaactttaattccccacgggttggtggcttcatcgacaatatgcagcagccgcgtgttgatgctgtcgcgctgggagagcatttcatccagctccatcgaaccgagtaccgtacggatattggtcatggtcaggttaatgatcgccagttccaggttactgacttcataagcggcgcgcggcgcatcgataacctgaataaaacagaccgcatcgatagtgacgttggcgttatcttttgagatcacctcctgcgacggaatatccagcacctgctccatcatattgatcttgcggccaattctgtccataaacggtacaacaaggcttaatcccggctgcagggttttggtgtaacgtccaaagcgctccaccgtccactggtatccctgcggaacgattttgacgcccgcgccgacgatcaccagcgcgacgaaaatgagaatagggataagaatgagcatagctaaacctcctgttgcgttgtccataaaccgattttgctgacgaattaagcgaattatacctgattcagtaaagcatgttccccccttattaattacagggatacactatcgctataaaaatatgaacaacggatgcgcaataaatgacagaacgtagcatgttgcttgagttaaagcaggtcggttaccggactgcgacgacaaaaatagtgaataacatcagttttacgctgcaacgcggcgaatttaagttaattaccggtccttctggctgcggaaaaagtacgttgttgaaaatggtggcctcgttaataagccctgatatcggcgtgattctttttgaggggcaggatattactactctgagtccggaagcctatcgccagcaggtttcttattgcgctcagacgccagcgctatttggcgatacggtttacgataacctgatttttccctggcaaattcgccatcagcgcccgcagccgacagccttcgcagacgatctggcgcgttttgaactgccggagacgattctgcaaaaaccgattaccgcgctttccggcggagaaaaacagcgtattgctctaattcgtaatctacagtttctgccgaaaatactgttactcgacgaaataaccagcgcgctggatgaacataacaaacggaatgtgaatgatattattcatcgctatgttcgcgataagcaggtcgctgtcttgtgggtaacgcatgataaagatgaaattcaacacgcggataaggtgataacgttaacgccatctgccggagagatgcaggaggcgcgttatgaacgagcataatattaccaatacctcgctggcgttatcgatgctgctggtggtggtcgcgatgctcatcagtcacaaggaaaagctggcgctggaaaaagatattctgtggagcgtatgccgggcggtgatacagctcattattgtcggctatgtactgaaatacatctttggcgttaatcatgccgccctgacgctactgatggtgctgttcatctgttttaacgccgcatggaacgcgcaaaagcgcagtaaatatatcgataaggcatttctctcctcgtttatcgccatcaccgtcggcgccgggctaacgctgacggtactggtgcttaccggttcgattgaatttgcgccgatgcaggtgattcccatcgctggcatggtcgccggtaatgcgatggtagcggtagggctgtgctacaaccaactggggctgcgttttcatagcgagcagcagcaaatccaggaaaagttaagtttgggcgcaacgccgaaaatggcctccgccgggcttatccgcgatagcatccgcgcatcgcttatcccgacgatcgactcggcaaagaccgttgggctggtgagcctgccggggatgatgtccgggctgatttttgccgggatcgatccggtaaaagcgattaaatatcaaattatggtaacgtttatgctgttgtcgacagccagcctgtctaccatcattgcctgctatttaacctaccggaagttctataattcgcgtcatcagttggtagtgatgccgctcaagaaatcatgatagttgccggatgatggcgcaagcgccttatccggcctgaggacgacaggtaggccagataagcgcgccatcaggcaagagaggattaatacagtagcgcgtacaactggcggcggtatttcgacgccagcgcgtcgccggtgccgagcgcggcaaggatctcctggaaggttttgcgcgtctgtccctcggcggcggtaagatcttttctcagatggctgaacagcaattccagcgcttcttcattacgtccgacctggtgcaactgcaatgccagttgcgttgccaaagccgcatcctgcggattgtccgcgacttgctgctgaagttgctgaatttccggcgtatccgccgcctgtttaagcagttcgatctgcgcaaccagcccctgataacgggtatcctgatcctgtagcgggatagtttttaacaccgcttcggcctcttcagagcggttcagcgcaatttgcgcttccgccagtaacaggccaatctcactgttctgcgaagagagctgccaggcgtctttgagcaacggcagcgcgtcaatgtagttgccctcctgcattaactgcatcgcttgttgcgcctttagctcttcttcgcgcggcagtactttatccagcagagcgcggatcgcctcttccggctgcggtccctggaaaccatcgaccggttggccattctggaacagatagactgtcgggatggcgcgcagcccaaactgagcggcgatcatctgttcggcgtcgcagtccagctttgccagaataaactgaccgtggtactgggcagccaggctttccagcactggcgttaattgcagacagtgttggctgcgttcagaccagaaatagaacagtaccggcgtggtcatggactgctctaaggtctgctgcaggttggattcattaatattgacaatgttctgtacggacatggcgtcgctctcttttgtctgtgtcacgtttacatgggggctgacgggcgcgcttcaactcagctttgtaaaattttatccagcatccggcccggcaatatgcgtttcagcgccatcaccgcccaggtgaccagcgtaacgggatagcgcagcctgggtttatcgcttgcaaaagcatgacgtactttcgctactaccgcgtcaggatcgcgggtgaaacgtgcggcgatgccgggattttctaccggtttatcacgctgcgtctggttaacgttatcggtaaaacgggtacgaatcggccccggttctatcaggctcactttaatgcctgtgtgccgtagctccatacgtagcgcgtcagaccaggcttcgagcgcatatttgctggcggcgtaagcgccgcgccctggggtggaaatcagccccatcaccgatgaggtcatcacaatgcgtccttcgccatgcggcaacatggcgggaagtaagcgcatagtaagctgatgcgcgccgaagaaattactggaaaactgttgctccatctgctcacggctgatggtggaaagggggccatacacgccgtagccggcattgttaaagatcccatacagacgattatcggtcagggcgatcacttcatcggcggcacgatccacgctttcaggggagtcgagatcgatcaacacgccggtaaatcccatactgttcatccgggcgacatcatcaggtttgcggcagcccgccaggatttgaaagccctggcgtttaagctcaagcgcgctgtccagaccgattccgctggaacatcctgttattaagaccgatttttgcataactttacctgtcaggatctccgttgatttaagagtcgtggttaactatatccgtcatacttcaagttgcctgtgcgttcgtttactccagtcacataggtatctatgctcctggacattctcttacgtgccgccttcatgcaactcgaatgattcaggagagaaaaggggtcaactgcttcgccatccagtcggcaataaacggctgggcgtcgcggttgggatgaatgccgtcatcctgcatccactgcggtttcagatatacctcttccataaaaaacggtaacagaggaatatcgaactctttggcgagcttaggataaatggcgctaaaggattcattataacggcgaccgtagttagcgggcagatgaatttgcatcagtaacggttgggcatcggcggctttcaccgtctgaatgattttacgtagcgtctgttcggtttgcgcaggcgcaaaaccgcgtaggccatcgttgccgccaagttccaccactacccagcgcgggtgatgctgttgcaacagcgccggcaaacgcgccagtccctgctgcgaggtatctccgcttatactggcattaacgaccgacgttttgttttgccatttatcattaaggagcgacggccatgccgcgctggcggccatacggtaaccggcgctgaggctatcgcccagaattaataaggtgtctgcggcggcggcacggaaagttaacaggatcaaaaacaggaagggcaaatgccagcggaaaacagtgttgaagttcatcgtctcaggaagtccgtcggtcagggtgagcatgagctttccatccttaccggagttgaactggttgtcaaacgcggcgaaaccattgcgctgattggcgaatcaggatcgggaaaatctacgctgctggcgattctcgccggactggatgacggcagtagcggagaggtcagtctggtcgggaaaccgcttcaccagatggacgaagaggcgcgggcgcagcttcgcgctcagcatgtcggttttgtttttcaatccttcatgcttattcctacgcttaacgcgctggaaaacgttgagctaccggccctgctacgcggtgaaaacagcggtcagagtaaggcgggggcgaaagcgctgctcgaacaactgggactgggaaaacggcttgaccaccttccggcacagctttccggcggcgaacagcagcgcgtagcgctggcgcgcgcgtttaacgggcgtcctgatgtgctgtttgccgatgagccgacgggcaaccttgaccgtcagaccggagataaaatcgccgacctgctattttcgcttaaccgcgagcacggcaccacgctgattctggtgacgcacgacccggcgctggcggcgcgctgcgaccggcggctgcggttggtcaacggtcagttacaggaggaggcatgatagctcgctggttctggcgcgaatggcgctcgccgtcgctgattattgtctggctggcgttgagtctggcggtggcctgcgtactggcgctcggcagtatcagcgaccggatggaaaaagggttaagtcagcaaagccgcgagtttatggcaggcgatcggacgctgcaaagttcgcgggaggtaccgaaagcctggcttgaagaggcgcgtaaacgcggccttaacgtgggcgagcagttaacctttgcgaccatgacgtttgccggcgatacgccgcaactggccagcgtgaaggcggtagatagcgtttatccgatgtacggcgaattgcaaacccgtccaggcggagtgaaagcgcagccgggtagcgtactgctggcgccgcgtctgatggcgctgcttaatttgaaaacgggcgataccattgatgtcggcgacgtgaccttgcgtattgccggtgaagtggtgcaggagccggattccggatttaacccttttcagatggcgccgcgtctgatgatgaatatggccgatgtggcaaaaaccggtgcgatacagccggggagccgcgtgatgtggcggtataaattcggcggaacgccgcaacagcttgctggctatgaaagctggctgttaccgcagcttaaaccggaacatcgctggtacggactggagcaggatgacggggcattggggaaatcgctcgaacgttcgcagcagtttttgctgctttcggcgttattaacgctactgctggcggtagctgccgtcgcggtggcgatgagccattactgccgtagccgctacgatctggtggcgattttaaaaacgttgggcgcgggccgggcccagttgcgtaaacttattatcggacagtggttgatggtgctggggctttccgccgtcacgggaggcgcgattgggttactgtttgaaaacatattgctggtgctgctaaaaccggtactgcccgccgatttgccgcccgccagcctgtggccctggctgtgggcgctgggcgcgatgacggtcatctctctgctggtcggtttacggccttatcgattgttgctggcgacccagccgctacgggtgctgcgccgcgatgttgttgctcgcgtctggccgttaaaaatttatttgcctgtcgcctgcgccgtcgtggtggcgttgctcgtcggattgatgggcggaagtatgctgttgtgggcggttctggcgggcgccgtgatactggcgctgctgtgcggtctggtgggctggatgctgcttaacgtgctgcgcggcatgacgttgacgtcgctaccgctgcgtctggccgtcagccgacttctgcgtcagccgtggtcaacgttgagtcagctttcggcgttttcgctttcgtttatgctgctggcgctcttgctggtgctgcgcggcgacctccttgatcgctggcaacagcagctcccgccggaaagtccgaactatttccttatcaatattgcttcagaacaggtcgcgccgctgaaagcctttttggcggaacatcaggtgatcccgcagacgttttatccgattgtgcgggcgcggttaacgaagataaacggtaatccgacggaaggtcagcaggatgagtcgctcaaccgtgaactgaatttgacctggcaggatacgcgcccggcgcataatccgctggtcgccggtcactggccgccaaaaccgggcgaagtctccatggaagaggggctggcgaagcggctgaacgtcaaactcggcgatagcgtaacctttatgggcgatacccaggcatttagcgctaaagtcaccagcctgcgtcaagtggactgggaaagcctgcggcccaactttttcttcatttttccttccggggcgctggacgggcaaccgcaaagctggttgaccagttttcgctgggagaatggcaacggcatgttaacgcagcttaaccgcgagtttcctaccgtcagcctgttagatatcggggcgatcctgaaacaggtgggacaggtgctggagcaggtcagtcgggcgctggaggtgatggttgtgctagtcaccctctgcggcatgttgctattactggcccaggtacaggtcgggatgcgtcagcgccatcaggagctggtggtgtggcgcacattaggagccggaaagaaactgttgcgtaccacactctggtgcgaattcgccatgctggggttagttgccgggctggtcgccgcgattggcgcggagacggcgctggcgatcttacaaatcaacgtttttgatttcccctgggagccggactggcgtttatggggcgcactgccgttttgcggcgcgctgctgctttccgtatgcggcggctggcttggcgttcgtttgctgaaaggcaaagcgctattccgacagtttagcggatgattcatgatgtgaataatttcgcgccggtttttaaaacggcgcgtacttttttagtcgcacaaattgataactccttgatttttagtagcacaaatcattaaaaaatacacaacacgtaaggttttataacagttattatttgcctgctaaatgatttggattggctatctatcaaggaaaatataatgacaattaaaataacagcgttggcggcatcgatcggcgcggcagtggctttcatgcctttcgccactcaggcggaaatcaccgttttaaaacaagatccccaggcgggtaatccactcagccgactcaatttcaccgttggcgggagtattcgtccgcagttccagaatatgaccggcaatgacggcgcgaacggttataaacgtaatggttttgatggcgggacgcgtttccgcttcgccgcggattattatctgtttgatgatatcagttggattagctattacgagctgggcgtcaatatccctgcggtatttgactgggataaccattatgcgaagggcgcgactgataccactcgccgtatgctgtataccggcttcaagagcgcgacgtggggaacgctgaccttcggtcaacagaacagcatttattacgatgtggtgggcgtaaaaaccgatatctgggattacgacatgataggtcaggcgccgggcaacgggattaacggcgactacgatggttcttatcgcacgcgtaagtcattgaagtataagaaaagcattggcaatgtcgatctctacgcgtcttatctgttcagcgacgattataatgccaataacggcctgaattacaagcgtaaaggcggcggttctttaggcgcggattaccatctcaccgacgatctgacctgggggacggcatggaactatacccgtgcggagatgcgcggcaacggcaataaaacttacgatcaaaatattgtcggtaccgcgttaagctggacgccggaaaactggactatcgccgcaggcggcggttggtatcagaactttatgacgaccaaaaaagtgtctgtgaatgattactttgccggcgatgcgtggggtctggaatattttgtcggttacgctttcccgattggtcagtatgccgtgaaagctattcaaccgtactttatgggcgaccgcattgaatatgtgaatggccgcgactatctgcgcaccgataacggcgtggggatcaccttccaactggattatggtttccgcgttgattatgaacatgttttcacttccagcactgacaatctgggcgatatgaacctggtgcgtctgcgttacgatttctaaagcgttttcctctgccggatgttggcgttaagacctcttatccggcatttccctttacgccattcccgcctgacacacgcctgagcgcctgcctcgtacatttaacgacacaccaggaaacatcatgaaataatttcaaggacagcaggctgtgatctgtgtcatgttaagaaatagcctttcgtttgggccaaaacagacgatgccgcatgaacggcatccggcacagcatcacactatttaaaatggagaaattatgggattgcgtcagagtttacgcattgcggccagcacgctattactggcctgcggattacagtttgcccatgccgatagttccccgcaaacgatcgtatttggcgtcgcgccagggccgtatggcgacatggtgaagcaggcgattgcgccgacattaaaagaaaaagggtataaggtcgtggtgcgcgagtttagcgactatgtccagcccaatatggcgttagctaatggcagcatcgacgccaacctctttcaacataccctctattttgacaaattcaccgctgacaaagggctgaagctcagcaaacttattgtggtaccgaccgccgggatgggcttctattcacgtaaaatcaacagcctggatgcgcttaaaaaaggggacattattaccctctccaacgatccgaccaacctggcgcgcggccttcgcttcctgcaatcgttggggcttatcacgattaaggacaatatcgatccgaccaaagcctctgaacgagatatcgccagcaatccaaaaggactggttttcaaaccgctggaagccgcacagctaccgcgcacgctggatggcgtgaccggcgcgctggttaacgggaactttgcggtggcggcaggactcgatctctccagcgcgattaagcaggaacacctggatgagaatctgaaaaatatcattgcggtacgcagtgaagatgccgataagccgtttgccaaagatattgtcgaggcggtgaaatcgccggcttatcgcgcggttatcgacgatccaaagaatatttatagcgccttccagaaaccggaatggatgaccgcgacaccctgatcgcagcggtggccatccccaatttctgaggtgaatatgattgaaatagaaaaagtctgcgtcgattttaccgccggtcgcggtacccccacgcgcgcggtggatgatgtgagcctgcatatcgccgcgggcgagatttttggcattgtcggtaccagcggcgcaggaaaaagcactctgctgcgtaccctgaacgccttaacgcgtcccagtcaggggcgcgtcaacgtcaacggcgtggaaatttcggcgctggacggaaaagcgttacgccaggcgcggcagcgtattggtatgattttccagcattttaacttaatgcatacccggacagtggcgcaaaacgtggcgtttagcctgaaagcggctggctgggaacgcagcaaaatcgcgccgcgggtggcggaaattttaacgctggtgggccttgccgataaagcgaaccgttttccggtacagctcagcggcgggcaaaaacagcgggtggggatagcccgcgccatcgctaaccatccggatgttttgctgtgtgatgaaccgacttccgctctggatctggaaacttccgccacgattctggccctgctcagacagatcaacgcacagcttgggattactattgtgctgatcacccatgaaatgaacgtgatcaaatctatttgcgatcgcgtggcggtgatgtcgggcggtaaggttgtggaatcgggcgaggtgtttgatgtgtttgcccacccgcaacacgctttcacacagcaactggtgtctcatacccttaatttgaccctgccggaacgtttacgggaacacctgcccgggcagctgctgaaaattttgtttatcggcgattcggcggagcagccggtactgtcggaggtggcgatcaagtttggcgtcgcggtcaatatcctgcatggcaagattgagtatatcggcgaacgcgcgttgggcattctggtggtgcaattaaccgcgccgcataatccaacggcggtggccgccgccgtggagcatatccgtcaacgtactgcacaggtggaggtgatccgtggatgatttattgccggatttaacgctggcgttcaatgaaactttccagatgttgagtatttcaacggtgctggcgattcttggcggtctaccgctcggttttctgatttttgtcaccgatcgtcatctgttctggcagaaccgttttatttatctcgtcgcctcggttctggtgaatattatccgctcggtgccatttgttattttactggtgctgttactgccgctaacgcagcttttgctgggcaatacgataggcccgattgcagcctccgtcccgctgtcggtggccgcaatcgcgttttatgcacgcctggtagatagcgcgctccgtgaagtcgataaagggattattgaggcggcgctggcattcggcgctagtccgatgcgtattatctgtaccgtactgttgccggaagccagcgcagggctgctgcgcggcctgacgattacgctggtaagcttaatcggctactcggcgatggccgggattgtcggcggcggcggggtaggcgacctggcgattcgctatggctactaccgttacgaaaccgaagtgatggttgttaccgtagtggcgctgattgtgctggttcaggtcgttcagatgctgggcgactggctggcaaaacgtgccgacaagcgcgacagacactaagccggctcaatgtagcgtcagccggcaataaaagtaagctattgcgcttttagccagttggcaacgtcttgccatgtgccgcgaaaaacgatattcgcggcttttttctccagttgatagcgatacattgggtcgtaatattcgttaagtagcggaaccagccatgccatatggccgtcagtgctgccgctggataattgctctgccagcgccctatccagcgtgtccgtcagttcggcaaagcgttgcaaccccagacggcggcgaatagcgaacagtccatgatgaagatattcactatacgcctgccaaccggcttcatcgccgtaggcgtgggtgaagtcgtgatgcatacggatgaaatactcttcacgcagtcgttccagacgaagcgcaaacggatcttccactaccgcaatgggggcctgcgccattctttcgcgtaaacactcaggcagatggttggcgccgatcgttcgcccttcatcttccagtacccacctttttagcgtctgacgcgcgttaattttcagcaattcaacggcaagtttgttttcaaaactggcctggctgagctgggggttcagcgtgcggccaaaagaggagccgcgatgacgcgcgagaccttccagatccacgccgttgggctgttgtcgtaccagttgcgttttgccgctgcccgtacagccgccaattaaaagtatcggtttttgcgccagttgccaggtcgcctgaattgctgtctggcgcagcgctttatagccgccttcaataagcgggcagtcaatccctgtttcttgcagccaacgttgtacgatatgtgaccgctgaccgccgcgcgcgcagcacagatacccgttggggaaacgttgatacgcggctttccaggcctcaagccgctgctggcgaatgtcgccgcaaaccagccgatgccccagcgctaacgccgcatccgcgccctgacgtttgtagcaggtgccgacggcggctcgctcgtcatccatcatcaatggcaggttgatagcgcccggcatggcgccctgttcaaactcaatcggcgcgcgtacatcaattaaaggcgtatcggcaaggaggagcgcgcgatagtcctgtgctttttgtctgtcttgcataacgtaaaacgtaaccttaaatcatcctttgcgctattttacgcgccaattcgcaaagtggcttgatttttaacagcgtaccgtgttgaaaatggataaaaaaccggctatttcgggttgccgttgggtaaataatttcacaatgtcttctaccgctttgcctccgccaaatttatgccaggcgaggcttaacggtgagggcggacgcatcgtcgggatggtacagctcaccagttcgtttttgtcgatcagcgtttgacaaagcggctgcgggacaaaaccgataccgacgcctgccagatgagcggcgattttggtttccatatcaggcacgataatttccttctgccccggaaggcgccaggctacccgcttggtcagcgtacgcgcgctgtcttcgatattaattgccgggaaacggcgcaactgcgcttctgttagaggcccgctgacgtgagctaaaggatgatccgcggacatcacaaaacgccattgtacggaacctaaagggtcgagcataaaggtattagccaacggctcggtgccagttacgccaatcgccagcgaaaaaccttcatacaggagcgaatcccagacgcccatataaatttgccgggaaaagtgaaactgggtgaaagggtaacgcgcattaagccacgataagagactggcgaccgcttgcgggctatagagcaggttattcaccacaatattgacctgacgctctacgccgtcgttaacctggcgtagctcgtcaggcatgctgtccagccacgcaagccagtcttttgcctgagagagaaggtgagagcccgccgccgtcaacgagacgcttcgcgttgtgcgaaagaacagccctacgccggtattttcctccagcagtttgatgcggtagctaatggttgccgtggttttacacaggcgctccgccgctttggagaaactccccgtttcggcaacgctgataaaggtacgcagtgtttccgggtcaaacatcgtcagacgcctccttacgatcctgataaaaccagaattgttttcctatgatttttaagtagttttacataatagccatgtttgatttgtggtctaaatctacttttggaaaaatattccaacttttatgttgatgttaaatcccgaaggttttagattgcatggtattgaaaccggacagagtccaaaccgcggttaaacggaatcgagctacaagggaaaaataatgaaacttgaggtattaccgttagatcagaagacgttcagcgcttatggcgatgttattgagacgcaggaacgtgaattttttcatataaacaacgggttagttgagcgatatcacgacctggcgaaggttgaagttctggagcaggatcgcacgctgatcagtattaacagggcgcaaccggccgcgatgcctattgtggtacatgaactggaacgtcatcctttaggtacgcaggcgtttgtgccgatgaacggcgaggcttttgtcgttattgtcgcgctcggcgatgataaacccgatctctccacgctgcgggcgtttattagcaacggacggcagggcgtcaattatcaccgtaatgtatggcatcacccgctgtttgcgtggcagacggttaccgattttctgacggtggatcgcggtggcagcgataactgtgatgttgaaagtatcccgacacatgaactctgttttgcgtgacgctattggccttcttgcataagatgaacatattgttcattgtttatgctcatattttgggccggagttaacgtaaatatgacggaagtaagacgacgcggcaggccaggacaggcagagccgactgcgcagaaaggcgctcaggcgctggagaggggcatagcgatattgcaatatctcgaaagaagcggcggcagttcatcagttagcgatatttccggcagcctggatttaccgctttctacgacgtttcgcctgttaaaggtactgcaagcggctgattttgtgtaccaggatagccagcttggctggtggcatattggtttaggcgtatttaatgtgggctctgcgtatattcataatcgcgatgtcctctcggtagccgggccctttatgcaccgacttatgctgctttctggcgagacggtcaacgtagcgattcgcaacggtaatgaagcggtgttaatcggtcaaaaggagtgcaaatcgatggtcagaatgtgcgcgcccttagggagtcgtctgccgttacatgcttccggcgccggaaaagcgctgctttacccgctcaccgaagaagagctggtggggatcgtcgtcaataccggtttgcggcggtttacgccgaccactctggtggatttacctatcctgcttaaaaatctggagcaggcgcgtgaacagggctacaccgtcgaccaggaagaacatgttgtcgggctgaattgtatcgcctccgctatctatgacgatgcgggcagcgtggtcgccgctatctcgatatcgggaccggcttcccggctgacggaagatcgctttatcagccagggtgaactggtacgggataccgcgaaagacatcagtacggcgcttgggctaaaaccccctgtagcctgagccgcatcccgctcgctggagcgggacttttttaaaatttttaaaagttggaaactttttccaataaaaagaggtagcaataaaatggcaaaaatgagagccgtggatgcggcaatgtatgtgctggaaaaagaaggtatcaccacagcattcggcgttcctggggctgcaatcaaccccttctattctgcaatgcgtaagcatggaggcattcgccatatactggcgcgtcatgtggaaggcgcttcgcatatggctgagggctacacacgtgcggcggcaggtaatattggggtctgcctgggcacttccggcccggcgggaaccgacatgatcaccgcgctctattccgcttctgccgactccatcccgattttatgcattaccggccaggcgccacgagcgcgtctgcacaaggaagatttccaggcagtcgatattgaagcgattgcaaaaccagtcagcaagatggcagtgacggttcgtgaggcggcgctggtgccgcgcgtattacaacaggcttttcatctgatgcgctcaggccgcccaggtcctgtgctggttgatttaccgtttgatgtccaggttgcggagatcgaattcgatccggatatgtatgagccgttgccggtatataagccagccgccagccgcgtacagattgaaaaggcgctggagatgctgattcagtccgagcgtccggtaattgtcgcgggcggcggggttattaacgccgacgccgcgccactgctgcagcagtttgccgaactgaccaacgtaccggtgatccctaccctgatgggctggggctgtatcccggacgatcaccccttaatggcggggatggtcggcctgcaaacggcgcaccgctacggcaacgccactctgctggcatccgatatggtttttggcatcggtaaccgcttcgccaaccgtcatacggggtccgttgagaaatatactcaggggcgaaaaatcatccatatcgatattgaaccgacgcaaattggtcgcgtgttgtgcccggatctaggcatcgtttcggacgccaaagcggcgctaacgttgctgatcgatgtcgcgcaggagatgcaaaaggcggggcgtttgccatgccggaagacctgggtggacgaatgccagcagcgtaaacggactttgctgcgtaaaacccactttgacaacgtgccagtgaagccgcagcgcgtctatgaagagatgaacaaagcctttggtcgcgatgtgtgctatgtcaccaccattggattgtcgcaaatcgcggcagcgcagatgctgcatgtgtttaaagacagacactggatcaactgcggccaggcggggcctcttggctggacaatcccggcggcattaggggtttgtgctgccgatccgcaacgcaatgtggtggcgatttccggcgatttcgacttccagttcctgattgaagagttagccgtcggcgcgcagtttaacattccgtatatccatgtgctggttaacaacgcttatcttggtctgattcgccagtcgcaacgcgcatttgacatggactactgcgtacagcttgcctttgaaaatatcaactccagcgaagtgaatggctatggcgttgaccatgtaaaagtggcggaagggttaggctgtaaagcaattcgtgtctttaaaccggaagatattgcgcctgcatttgaacaagccaaagcgctaatggcgcaatatcgcgttccggtggtggtggaagtcattctggaacgcgtaaccaatatttccatgggcagcgaactggataacgtaaccgagtttgaagaggttgcggatagtgcgaaagatgcgccaacagaaacctgttttatgaaatatgagtaagggaggtaatcgatgttacgtttctctgccaatctttctatgctgtttacggaatatgatttcctggaacgctttgataaagcggcgttgtcgggatttcgcggcgtggaattcatgtttccctacgataacgacatcgaagtgttaaaacgtaagctcagggataataatctggaacatacgttacataatttacctgctggcgactgggcggctggcgaacgtggaattgcctgtattcctgggcgcgaagaagagtttcgcgatggcgtagcggccgcaatccgctatgcacgtgcgttaggcaataagaaaataaattgtctggtgggtaaaacgccgtcaggattctccgcaacggagatccacgacacgttggtcgaaaacctgcgctatgcggcaaatatgctggcgaaagaagacattttattacttatcgaacctattaatcactttgatatgccgggattccatctcaccggcactcaacaggcgttagcattaattaaggatatcggcagcgataatatcaaaattcagtatgatatttatcacatgcaacgcatggaaggggagttaacgcaaaccatgacggcatgggccgataaaataggccatttacagattgctgataacccgcgtcgcggcgagccggggaccggggaaattaattatgactttatttttaatgtcattaaacagtctggttatgatggctgggttggctgtgaatataaaccactgactaccacggaagcgggattatcgtggattaatcagtaccgttaaaacgcagaataattcgggcagcgcttttttttccactgtgttggaaggggattgtgttgcctgaatctggaaacaccgaaagcaataaaagaggttgtatatgaaactgggatttattggcctgggaattatgggctcgccaatggctatcaatttggcacgcgccggtcatcaattacacgttacgactattggtccggtcgcggacgaactgctctcgctgggggcggtaaatgttgagactgcacgtcaggtaactgaatttgcagacattatcttcataatggtgccggatacaccgcaggttgaagacgtgttatttggcgaacacggttgcgctaaaacatcgcttcagggaaaaaccatcgtcgatatgagttctatttctcctatcgaaaccaaacgttttgcccagcgcgttaatgaaatgggcgctgattacctggatgccccggtttccgggggagaaatcggggcgcgtgaaggcactctgtcgattatggtcggcggcgagcagaaagtctttgaccgcgttaaaccgctctttgacatcctgggaaaaaatatcaccctggtgggcggcaatggggatgggcaaacctgtaaggtggctaaccaaattattgttgcgctgaatattgaagcggtttctgaagccttagtgtttgcttcaaaagcaggcgccgatccggtacgcgtgcgccaggcgttaatgggcgggttcgcctcttcacgcattctggaagttcacggcgagcgcatgatcaaccggacgttcgagcctggtttcaaaatcgcgcttcatcagaaagaccttaatcttgcattgcaaagcgcaaaagcgctggcgctgaatttaccgaatacggcgacctgccaggaattattcaatacctgtgcggcaaatggcgggagccagcttgaccattcggcaatggtacaggcgctggaattaatggccaatcataaattgtcctaattatgtgtatcgctgcggctgcagcgatacctgttcacaaggaacactctgtaaaggtgaagaacatgagtgaaactaaaaaatccggaattgattactggaaacaaattgttgtcgtaatgagtctgggctgggtagcgatttggatctatcgcaccgtgcttacgccaatttatccagaaattcaggcatctttagacaatgtaagtaatgctgaaataggcgccattgcaagtttttacttttttgcttactgcagtatgcaaatcccttgcggaatattggtcgataaattcggtcaaaaaatcatgctgatggccggatttacgctttttattattggtacactctgtatcgcgaaagccaatggcctgaccatgatctatatagggtcgctaatggcaggtggcggatgcgcttctttctttagctcggcttattcactctcttcggcaaacgtgccgcaggcccgtcgggcattagccaacgcaattatcaacagcgggtcggctatagggatggggattggcttaatcggttccagcatattagtaaaaaacatgagcatggcctggcaaaatgtactgtatatcgtggccgcgatattagtaatcatgctgtgcgtctttacgctgatcattcgcggtaaagccaaaagcgactctgcgcaagcggaaaagcaaacccaaaccgttacggaagatgagaaacgcgcgcctttattctctggtttattgtgtagcgtttacttcctctatttctgtacctgctacggttattatttgatagtgacctggctgccctcttatctccagactgaaagaggatttgatggcggagctatcgggctggcatcagcgctggtggcggtggttggcgtaccgggggcgttattttttagccatctgtcagataaattccgtaacagtaaagttaaggttattctcggtctggaaattgtggcggcagcaatgttggcgtttacggttttgtccccgaataccacgatgctgatggtcagcctgacgctatacggcttgctggggaaaatggcggtagacccgatcctgatctcctttgtatctgaacaggcttcggcaaaaagtctgggaagagctttcagcctttttaacttctttggcatgagttcagcggttgtcgccccaacgttgaccggatttatttcggatgtaacggggtcgaaagagatcagttttgtgatttcagcatgtttagtggtcaccggaacgctgatctttgctgtcgtcactttatataaaaagaaagcaacgcaacgtattgcttcagcttaaaaataattatatctactaattctttattttatatttatttgttcctcatagctaaacccataacaacgttatccgatgcgtgaaaagagggatttatggaacatcaaagagagctataccagcagcgcggttatagcgaagacttattacctaagacagaaacccaacgaaactggaaggcatttaactatttcaccttatggatgggatctgtacataacgtgccaaattacgttatggtcggcggtttttttatactggggctatcaacatttaatatcatgttggccattattatcagcgcattatttattgcggcggcgatggtaatgaatggcgcggcaggcagcaaatatggcgttccttttgctatgatattgcgaggttcttacggtgtccgcggcgcgctattccctggattattgcgagggggaatcgcggcaattatgtggttcggcttacagtgttacgcgggatcgctggcatttcttattttgattgggaagatctggccaggatttctgacattaggcggagatttcaagctgctgggtctttcactgccaggactaattacttttctaattttttggattattaacgttggcatcggttttggcggtggtaaagtattaaataaatttaccgctatcctcaatccatgtatttacattgtctttggcggcatggctatttgggcaatatcgctggtcggcattggcccgattctggactatctgccttcaggcgtgcaaaaagcagagcacagcggctttctgttcctggtggtgattaacgccgtagtcgccgtctgggctgcgccagcggtaagcgcgtccgatttcacgcaaaacgcgcattcatttcgcgctcaggcattgggacaaacattggggcttatcgtagcgtatatattattcgccgtagccagcgtgtgcattattgccggagccagtattcattatggtatggatacctggaacgtgctggatattgtgcagcgctgggacagcttgtttgcttcattctttgcggtgctggtgattctgatgacgacaatttcaaccaacgccaccggtaatattatacctgcggggtatcaaattgcggcgcttgccccgacaaagcttaactataaaaatggcgtaatgattgccagtattatcagtctactgatttgcccatggaaattaatggagaatcaggacagtatttatctgttcctcgatattatcggcggtatgcttggcccggtaatcggcgtaatgttagctcattattttgtggtaatgcgtggaaaaattaatcttgatgagctgtacaccgccagcggtgattacaaatattatgataatggatttaacctgactgcattttcagtcaccctagtcgcagtcattctgtcattaggcggcaagtttataccatttatggagcctttatcccgcgtgtcctggtttgtaggcgtaatagttgcgttcgttgcttatgcgctattgaagaaacgcacgggttttgaaaatacaggagagaaaaaactcgcaggttaaatattgaaaaagcattaagcgtatttaatgaagtgtgcgctatttaaaaactatctgtatccatacaaggagtttgttatgtcttttgatttaattattaagaacggtactgtcatcttagaaaacgaagcgagagttatcgatatcgccgtccagggcggaaaaatcgccgcgattggcgagaacctgggggaagcgaaaaatgtgctggatgcgacgggattgatcgtttcgccgggcatggttgacgcgcatacccacatttctgaaccgggccgtacccactgggaaggctatgaaaccggtacgcgcgcggcggcgaaaggcggtattaccacgatgattgagatgccgctcaatcagctgccggcgacggtcgatcgtgagacgattgaactcaagtttgacgcggcaaaaggtaaattgaccatcgacgccgcgcagttgggcggtttggtctcttataacctggatcggctgcatgagctggacgaagtgggcgttgtcggcttcaagtgctttgtcgccacctgcggcgatcgtggcatcgataatgattttcgcgacgttaatgactggcagttttacaaaggcgcgcaaaaactgggagagatggaccagacggtactggtacattgcgaaaatgctctgatttgcgatgagctgggcgaagaagctaaacgcgaaggtcgcgtaacggcgcatgattatgtcgcctcacgtccggtatttactgaagtggaagccattcgtcgcgtgctgtatctggcgaaagcggcaggttgccgtctgcacgtttgtcatatcagcagcccggagggggtagaggaagtaacgcgtgcgcgtcaggaaggccaggatgtcacctgtgaatcgtgcccgcactattttgtcctcgataccgatcagttcgaagagattggcaccctggcaaaatgttctccgccaattcgcgaccaggaaaaccagaaagggatgtgggaaaaactgtttaacggcgaaatcgactgcctggtatccgaccactctccatgccctccggaaatgaaagcaggcaatatcatgcaagcatggggcggaattgccggactgcaaaactgcatggacgtcatgtttgatgaagcggttcaaaaacgcggtatgtcgttgccgatgtttggcaaattaatggcgaccaacgccgccgatatttttggtctgaaacataaaggacgtattgcccccggcaaagatgctgacctggtctttattcagcctgacagcagctatgttctgaaaaatgaagatctggaatatcgccataaagtcagtccgtatgttggccgtactattggcgcgcgtattaccaaaacgattttgcgcggcgatgttatttatgacatcgagcatggcttccctgtgccgccaaaaggtcagtttatccttaaacatcagcagtaatccggtgtgatttaatgcccgtcgtcacgacgggcattctctattttaaggtgtggatatgttccctgttattaaccgcgaaagtgtgttgtccggctttcagtggtttttctttattttctgtaacactgttgtggttccccctaccttgctatccgcttttcatcttcccgctgataacctgttaatgctcacacaatacgcttttttgaccaccgcgttggcctgcctggttcaggcattttgcggccatcgccgtgccattatggaagggccgacagggctgtggtggggcgctattcttacgattacgcttggcgaggcgtctcgcggcacgccgctgaacgatatcgcctccagcctgtcggtcgggatcgcgatctccgcaatggtgacgatatttatcggcattagcgggttaggacaccgtctggctcgcctgtttacgccggcggtaatggtttttttcatgctgcttttgggcgcgcagctgacctcaatattttttaaaggcatgctggggctgccttttggcattgccgataccagcgccagaatcaaattggccccctttgggctggcggtcgcggtgatgtgttttatcctcgcgatgattattttcctgcaacagcgtatctcccgttacgcgttactggtagggaccgtggtcgggtgggggctatggcggttatgctttccttcatcacacttaccgccgggtgaattaagctggcgatggtttcctctgggcagccacggcacgctgatgccgggtattattgtgacggcggtgatgacggggttagtcaacatcagcaacacttacggcgccatccgcggtaccgatatcttttatctgcatcaagggtcgggcagttctcgttatcgccgaagctttatgatttccggactgatgacgttagtgacggtgcctttcgcggtcgtgcctttttcgccttttgtatcttccattggtttattaacgcaaaccggcgacagttctcgcaaatcctttatctgcggtagcgcgctgtgtctgctggttgccattataacgccgttaacccgcttattttgcgctattccactggcgatcagcagcgccgttatgctggtctcttatttacctttactttattccggtttggtttttagccagcaaattacgtttaccgcgcggaatatttatcgcctggcattaccgctttttgtcggcatttttttgatggggcttcctccggtctatttacaggatcttccactgatgattcgtcctctgcttagtaacggattactggtgggaatcttactggcagtgcttatggaaaatcttattccgtgggaacgcattaaataacatgagaaaacaaggagacatgatgaagattgtaattgcgccagattcatttaaagagagcttaagcgctgataaatgctgtcaggctattaaagcgggattttcaaccgtatttcctgatgcgcgctatgtctgtttaccgatcgccgatggtggagaaggaaccgtggacgcgatggtggcagcgaccggcgggaaacgggtttctgtggacgttagcgggccgatgggggaaaaagtaaacggattttatggcctgaccggcgacggcaaaacggcgattattgaaatggcggcggcgagcggattgatgctggtggcgcccgaggcgcgtaatccgctgctggcatccagtttcggcaccggcgaattgattcgtcacgccctggacgcggggattcgccatattattctgggtatcggcggcagcgccacggtggatggcggaatgggagtagcgcaggcgctcggtgtgcgttttctggacgcgcaaggaacgccgcttggcgccggagggggcaatttatcgcgcctggcgagcattgacctgcaggggtgcgatccgcgaatttcagagtgtcgtattgaggtcgcctgtgatgttgataacccgttggtagggccacgcggcgcggcggcggtattcggtccgcagaaaggggcgacgcctgaaatggttgagacgctggaaaatggattacgtaattatgcccgtgttttacatgccctgaccggacgcgacatgtctcaaataccgggcggtggagcggccggaggaatggggattgccgctatcgtcttcctggaagcggaaatgaagcccggtattgagattgttatgcaggcggtgaagctggaggaggcggtaaaagaggcctcgctggtgattaccggagaagggcgaatcgactcgcaaacggcgggaggaaaagcgccgataggcgtcgcgtcagtggcgaaacggcatcatgtcccggttatcggcattgccggcgtactgggcgacggcgtggaagtggtccatcgccacggtattgatgccgtattcagtattttgccgcggctggcgcctttgccggaagttctggcgaacggtgaacaaaatctctaccacagcgcctgtaatattgcccgcgtcatcaaacttggccaggacatcgggactcgttaagcataaaaaaagccacggttctcaccgtggcaaaatccaacatagctaaattaaaaataatcaggagggctgcccgccgttaaatcataacgtcgcggttacagtctttggagtagatgtagctgaatgcttcgccacgacctacaccgtatccggcctgcagggaataagcacccatgaagatgtagtcgccttttttcaccggcacccagttgttgtcgaggttataaaccccctggccggaaaggatataagcgccatgttcctggacgtgggtttcaatatagccgtggctggcgcccggttcgaacgacagaatatgcatattcatatcgaagcccagctctttaggcaggaaatccagcagaataacatcttccatgccttcataatgaatacgctccagctggctggcattgccggaaaccaaccacggggcatgcccctcgacaggagtatagcggcgtttatataaaaatagctggctgtcttccgtttgagcgttgctaaaggtcatcatctcgcccggtggacaatagaggtatccgccctgggttaaagagaatgtttttccttcagctttagcttcaatatttcccgcaatgacatagagaaaagtttcaatcccctcgccgccaaagccctgctggttgccgccattctgatgtaaggtgaccagataatcgacgaaagaagcacccagcttcggcgtcgaaaggatggtgacgtcacagttttcaaagccgggaataatatttttcaccagaccgtccggcgttaagagcgcatagttaccgtgtttcacaatggcgcggttcgccagtaaatcatcgcggtaacccgtgacgttattcagatatcccattgatggctccttatttttgccaggcaagttgatgcagcattaatgccagagttttgaccccttcagcaaggtcattaatgttggtacgttccgccgggttatggctgataccattaatgctggggacgaaaatcatacaggtagggacgcgcggcgcgaaaatttgcgcgtcatgacctgcgccgctatgcattatgcgatagttcagttgttcggtttcacacagcctggtgagggccgcgaccagttcggcgttcatcggcaccggcgcttcgtccatccacaaatcgatatcgatgctgatatccatttcatcgcagatggcgcgcatatcgttttccaactgttcggtaaattcgcgaagtacggcggcgtccgtatgccggcaatcgattgtaaatgtggtttttccagggactacattgaccgtattcggctgcggctcaactttgccgaacgttaataccaggggatcgccatgctgtttggctttttcaatggactgactgcaaatacgactgaaggcgtgcaccgtatcgcgacgatagcccattggcgttgtgcctgcatggttggactcgccgttgagcgtcaccgtgtagcgacgttgcccgacgatggcgttgacgacgccaatcgactgtccgttgctctccagaacgcagccttgctcaatatgcaattcaacaaaggcgcggatatcggttcgcgcagcgagcggcgcggcgggaagggtaaatccgcacgcctgcatagcgtcgacaaagcctgtgcctttggcgtcctggatatggcgtacctcttcaggattcgccaggccaaaaatgttcttgctgccccaaaaaacgtaagggaaacggctgccttcttcctcagccattgacactacctcgacggtgcgcagcggcgcgccgtaggtcgcttttagccagtcgagcgccagccaggcggcaagcgcgccgaattgcccgtccagattgccgccgttgacgaccgtatcaatatgcgaaccgcttaaaatcacctgctccggaaattgtgtgccgcaaaggcggccatataaatttccgacgtcatcaaagcgtgtctccagaccgctttctgccattcgctttttaaactgctgctgtgtttccagccactcaggcgaataaagtaaacgcgtcattccgcctgtaggatcggctccaatggaagagagccagggcaatgtttcttctatcgcgtggcgaaaatgctttatcatagaaaattcctgtttcaataattattgggcaaagggattttttgtttcgtatgacttgagatagagggcatcggaaatcagatattgataaatatcatcaacaatatcgataccattcatatcggcatttttctgtttaatatcctgatcctgtccaggataataaacctgtttaaaaccgggggcgggcttcacggcattgagttcctgcatggtctgactaatatgtttgcggaataattcacaggaagaaaagaacgccggattaatgaccagatgaagttgtcctaaattgcgtccggcgtgtaaatcttcatacatcgaactgacctggcggccaaacggcagccccagcagaataccggacagaatatcgatcatcatcatcaggccgtaacctttcgggcctgcggcgggtaataacgcattgacggcaaaaggatcatgtgtcggcgcgccatttttatcaacggcccaactctccggaatggactcattgcgggaccgtgcatcgaggacttttccccaggcctgcacggtggtggccatatcaaaggtaatgatgtcatcgccttcgcccggcgcggcaaaggccagcggattagtgccatagtaaatatccgccccgccaaacggcacgaccataggatcggactgacagatagacagaccaatcaggccttcgcgagcagcctggcggacgaaataagagatggcgccgctatggcccattctgctaatgccgacaaccgcgacgccattttttttggctatttcaatagcatgctccattcccattttggctgcgacctgtccggcagcattatcggcatgcagtatcgccgtacagggaccggtattctcaatgcggaacgtcggctcccggttggtgccgccttttgaaattcgttcggcataatattcaacgcgtacggcgccatgtgagtgaatacctctggcatctgcataaaccagtacgtcggcgacgatggcggcgtgctcacgttttagtccggctttataaagcttattttcgataagctgatggagtgtttcccgactgattttcatctgtcttcctttttaacgacggtgtgaagcatgactgcgattaacataccgggaaaataaaatgattatgtgatccagacaggcaaaaaaatataattagaatttatttgataatcaggcgggttttatctttttgcttaaataaaaagcttttttagaaaatcataactaatcctttagccgttgtttgaattcttttgttaataaatttgatgtgacgttaatcactctatttaccctcccggatatataccgtgaagcgcacattaacactgctcgtgcaattgcaatgggtgcaattgcaatgggtgcaattattaaggagttgttatgatccacgcctttattaaaaaagggtgttttcaggactctgtcagcttaatgattatttctcgaaagctgagtgagtccgaaaatgttgatgatgtatcggtaatgatgggaacgcctgcgaataagtcgctgctggaaactaccggtttctggcatgacgattttcatggcgctacgcccaatgacatttgcgtggcgattcgtaccgaagcggtagatgacggcattacgcaagtgattgtgcaacagctcgaagaagcattgcagcagttggcgcagggaagcagcggcagccagtcgttaatccaggtcagacgctgggaaagcgcctgtcagaaactgccagaggcgagtctggcgctggtatcggtggccggcgaatatgcggcggaactggcagagcaggcgctggatcgttcgttgaacgtgatgatcttctccgataatgtcacgctggacgatgaaatcagactaaaacgccgggcgcgtgataaaggactgctggtcatggggccggattgcggcaccgctatgatcgccaatacgccgctggctttcgctaacgtcatgccagagggcaacatcggggtgattggcgcttccggcaccggtattcaggagctctgttcacagattgcgctggcgggggaagggattacccatgccatcgggcttggcggacgcgatttgagcgccgaagtcggcgggatcagcgcgctaacggcactggagatactcagcgcggatgaaaagagccaggtgctggcctttgtctccaaaccgcctgccgatgcggttcgtcagcatattatcgcggcgatgaaagccgccgggaaacccgttgtagcgctgttcttagggttttcctcccccgttgcgcgtgaggaaaacgtctggtttgcctcgacgctggatgaagccgcccgactggcatgtttattgtctcgcgtgacgtcgcagcgtaaagaaatggtttcaacaggcggcgtgattcgtggtctctataccggcggaacgctggcggcggaagcggcggggctgctggccggctatctgggcgtcgcggcggatacggaacatcaccatggcatgatgcttgacgctgacggccaccagattatcgatctgggcgatgacttttataccgttgggcgaccacatccgatgattgacccggcgttacgtaatcagcttatcgccgggcttggcgcacagccgcaggtacgcgtgttattagtggacgtcgttattggttttggcgcgaccgccgatcccgccgcatcgctgattcaggcctggcagaaggcatgcgacgcacgcgccagagaccagccgctgttcgccatcgcaaccgtcaccggaacggaacgcgatcctcagtgccgctcgcaacaaatcgccgcgctcgaagatgccggcatcacggtagtggattcccttcccgaagccactctgttggccgcggaactgattcgacccactctctcttctactcatccatcagccccccggttactggaagcggtggcggtgattaatgccgggttacgtagcttcgcgctggatttacaggctgccggtatgcccgtggtgcactaccagtgggcgcctgtcgctggcggtaataaaaaactggctcgtctgttagaacgtttgcaataaggggttcccatgtttacatcagtggcgcaagccaacgctgcagtcatcgaacaaattcgtcgcgcacgtccgcactggctggatgtgaagccagcttcttcattaattagcgtgctcaatcaagggaaaacgcttcttcatgccggcccgccgatgcgctggcaagagatgaccggcccgatgaaaggcgcctgtatcggcgcatgcctgtttgaaggatgggccaaagatgaaatgagcgcgctcgcgctgttagagcagggaaaggtcaactttattccctgccatcacgttaacgccgtggggccgatgggcggtattacgtcagccagtatgccgatgctggtcgtggaaaatatcaccgacggcaatcgcgcgtactgcaatctcaacgaagggatcggcaaagtgatgcgtttcggcgcctatggcgaggatgttcagcaacgtttgcgctggatgcgcgatgtgctgatgccggtattaagcgcggcgctgggacgtctggagcgggggctcgacctgaccgcaatgatggcgcagggcattacgatgggagatgaattccaccagcgcaatatcgcctcttccgcattgctgatgcgcacgttggcgccgcatatcgcccgtctggaacacgataagcagcagatagcggaagtgatggattttctgagcgtcaccgatcaattcttccttaatctggcgatggcctactgtaaagccgccatggacgcgggcgcgcagattcgcgccggcagtattgtgacggcgatgacccgcaatggcgatatgtttggcattcgggttagcggtctgggcgaccgttggttcaccgcgcctgttaatacgccacaggggctattttttaccggtttttcgcaggatcaggccaacccggacatgggcgacagcgccattactgaaacgtttggtattggcggcgctgcgatgattgccgcgcctggcgtaacgcgttttgttggtgccgggggaatggaagcggcgaaatctgtttctgaagagatggctgaaatttatctcgaacgcaacatgcagctacaaatccccggctgggattttcagggggcctgtctgggactggatatccgccgcgtggtcgagaccggaattacgccgctgattaacacgggtatcgcgcataaagaggcggggattggccagattggcgcgggaaccgtccgtgcgccgctggcctgtttcgagcaggcgctggaagcgctggcggaaagcatgggcgtaagttaagagagcgtctcatgaaacgtatccatcctcttatggcaagccgacaatcggcggattatcggcaaccctggcagatgtcaggggtatggcgtcgctctattaattttgtggcgaaaagcggtgagttattaacgcttcaccgtcgggggagcggcttcagtccgggagggtggatactgcgcggcggcgattttgacgccttgcgcgatgtgctcaccgatggcgaaaaaccgcagtcaaccgctgccggtattcagattggcgagtttcttttatgcgagccggagaggcgctgttcgctgcgggttccacgctatcttgcgtcgccgcgtcttaacgcgacgtacatgcagcgtagtgaggagacggggctgtttgggccgttaaccgtcgccgcagctcagcctctatgtccggaacttcgccagttttgtcactgctttcagtcggcgcttgcaggtgctgcgactgactggcggctatggctgggtaaagggccgggcttaacgcccagtcatgacgacacgctgacgggaatgttgctggcggcctggtattttggcgccatagatgaacgcgccgggcgtaatttttttgcccaatccggcagccttgatcgggcgacgacgctcgtgagcgtcagctatttacgctatgcggctatggggtatttcgcgtcgcctttactccactttattcatgcgctgcgacgagatgctcgcacagaaacggcgattgacggactgctggcgctggggcacacctctggtgcggatacgctgctggggttctggcttggacaacaaatagtaaaaggatagggaatgaaaacgttggtagttgctcttggcggcaacgcattattgcagcgcggagaagcgctaacggcagagaatcaatatcgcaatattgccgacgcagtgcctgcgctggcgcgacttgcccgctcgtatcggctggcgatagtacatggcaacggcccccaggtcggcctgttggctttacagaaccttgcctggaaagccgttgagccttatccgctggatgtgctggtggcggagagtcagggcatgatcggctatatgctggcgcaacgtctggcgcttgaacccgatatgccgccggtgactgcggtattaacgcgaataaaggtatcggcggacgatcctgcttttcttgaaccggaaaagtttatcggtcccgtttattcgccagaagagcaaatggcgctggaagcgacttatggctggcatatgaaacgtgatggaaaatatctgcgccgtgtcgtcgcttccccggcgccgcgtcagattatcgaaagcgccgctattgagttattgctaaaagagggccatgtggtgatttgcagcggcggtggcggggtacctgttgccggcgaaggcgaaggggtcgaggcggtgatagataaagacctggcggcggcattgctggcggagcagatagcggccgatggtctgatcattttgacggatgcggatgcggtgtatgaacattgggggacgccgcagcagcgcgctattcgtcaggcttcgcccgatgagctggcgccgtttgccaaagccgatggcgcgatgggaccgaaggtgaccgcggtaagcgggtatgtgaagcggtgcggaaagccggcatggattggcgcgctgtcgcgtattgatgataccctggcgggcagggcgggaacctgcatctgtctgtgatcgcgacgggcggcaacagagaatgcgccgcccacgctgtttatttaagcttactttgcgcccagataatgccgctggcgtattcgcctggcaggagcggagagagcgcttccagggtggcgctaagacgtgacgtatcgctgtcggtcagattcagatggccgacttttcgccccggacgtaccgctttatcataccagtgcagatgtaccagcggcagcttcagccagtcgtaattcagctcgctgccgatcaggttgatcatcaccgacggggcgttaatcaccggcgcgggcaacggcaggccggtaatcgcgcgcaaatgcaattcaaactgactgatgctggcgccattttgcgtccagtgtccgctgttatgcacgcgcggcgccagttcattgattaacaggccttccggcgtgataaaacattccatcgccattacgccgacgtagttcagcgcctgcataattgctgacagcatcgattccgcctgctcctgctgttcggcgttcgcctgtgggaacgcgacgctggtccgcaagatgccgtcctgatgcaaattgtgcgttagcgggtaaaacacggtactgccgtcatgagcgcgcgcgccgactaacgacacttcgccggaaaaatggataccgcgctcaacaatacattcgccatagcagtcatccggcagttgcccggtttcgtccgcgcgtagacgccactgcccgcgaccgtcgtagccgccaacgcgacgcttaataatcgccagttcgcccaggcggtcaaagatgccggaccactcgtcggtgctggtcagcagctgccacggcgcggtcgcgagtcccagtttatcgaaaagctgtttttgtgtcagacggtcggcgatgatcggaaatacatcgcgattgacgaaggccgggtggcgcgccagctcgcgggtaagcgcggtttccggccagcgctcaatctctgcggtaatgacgctctgctgtaccggcacggcggtaggctctgcatccagaccaaccggccagacggcgatacccagcggttcgcccgcctggcgcagcattcggcccagttgtccgttgccgagaacgcaaacttgcttcatagcgtcccccgcggatcgggattttccagaacttcatcggtttgcgctttgcgccagtcggcaatgcgctgatgcagttccgcgtcgtgttgcgccagaatctgcgcggcgagcagggcggcgttagcggcaccggctttaccgatcgccagcgtacccaccggaatgccgcgcggcatctgcacgatggagtagaggctatccacgccgcttagcgcagcgctttgtaccggcacgccgagtaccgggaccagcgtttttgccgcaatcattcccggcaggtgcgccgcgccgcccgcgccggcaataatcacttgatatccgttctcttccgccgtttcggcgaagctgaacagtttatcgggggtgcgatgagcggaaaccacttctacatggtgcgggacatccagaatttcaaaaatttcggcggcgaattgcatggtagcccagtcgcttttggaccccatcacgatggcgacacgcgccggattattgcgggaagacatgcgtcttaaaactcctgtggtgcgggacacgctgcttttgaggtgtcagagaatagcatgataatcaggcaaggaaaacggttgcgtgcgcgccgtaacggacgattcgacgaacatttacagggggaaggcgattaactcaacgttgtccggcgtgacttttaccattgaaccttcatgatgccatgcgcctaacaccacgcggaatgcgggctggtcgttggcggaaagttcatgcaccgccgggcggtgggtgtgaccgtgaatcagccactgtacgcggtgtttttccatttcggcgacgacggtctgcgcattgacgtccataatatccagcgatttgctgctgttggcggctttactgccggcgcgcattctggcggcgatacggcggcggataaacagcggcagggtaaggaacagtcgttgcacccacggattatggactttggcgcgaaacgcctgatatccggcatcatcggtacagagcgtatcgccgtgcataatcaacacattgcggccatacaggtcgagcactttttcctgcggcagtagaatcatgccgctttcgcgggcaaagcgtttgccaatcaggaagtcgcgattaccatgaataaagaagcaggggacgccggaatcaaccagcgatttaatggcaacggccatttcacgatgtagcgggttggggtcgtcgtcgccaatccaggcctcgaagagatcgccaagaatatacagcgcgtcggcctgacgggcttctacggctaaaaaacgcagaaaaccggcgacgatcgccggttcttccgtttgcagatgcaagtctgcaataaacagtgtcgccacgattactcgctgacggtcacgttttcaatgatgacgtcttcttttggtacgtcctggtgcataccgctacggccagtggcgacgcctttgattttatctaccacgtccataccttctacgacttccgcaaagacgcagtagccccagccctgcagactttcgccggagaagttcaggaagtcgttgtctgccacgttgatgaagaattgcgcggtagccgagtgtggtgcctgagtacgcgccatcgccagcgtaccacgggtatttttcagaccattgttggcttcgtttttgatcgcctctttggtggctttctgtttcatgcccggctcaaagccgccgccctgaatcataaaaccgttaatcacacggtggaaaatggtgttgttgtaaaaaccttcgcggcagtagtccaggaagtttttaactgtttcaggcgctttatcatcaaaggttttgattacgatatcgccgtgattagtgtggaaagtaaccatttttgcatcctgttccaagagagtggtgctttagcccgcaatggggcacatataggggcttgttatagcataaccgtaagctgcgatcaccttgcaaagtgtgctgcttcgattacgaataatatgtatcatacggagattattacccacacacgtctatacggaatcttcgatgttaaaaatttttaatacactgacacgccaaaaagaggaattcaaacccattcatgccggggaagtcggcatgtacgtgtgtggtatcaccgtttacgatctctgccacattggccacggacgcacgtttgtcgcttttgacgttgtcgcgcgctatttgcgttttctcggttataagctgaagtatgtgcgtaacattaccgatatcgacgataaaattattaaacgcgccaatgaaaacggcgaaagttttgtcgcgctggtcgacagaatgattgcggaaatgcatcaggacttcgatgcgctgaatattctgcgtccggacagcgagccgcgtgcgacgcaccatattcaggaaattatcgagctcacccgaaccttaatcgagaaagggcacgcctatgtggcggataacggcgatgtgatgttcgatgtaccgaccgatccgacttatgggcagctttcccgtcaggatcttgagcagcttcaggcgggcgcgcgcgtagatgtcgttgacgtgaagcgtaacccgatggacttcgtgctgtggaaaatgtcgaaagagggcgagccgagctggccgtcgccgtggggcgaagggcgtccgggctggcacattgaatgttcggcgatgaactgcaagcagttgggcaaccattttgatattcacggcggcggttccgatctgatgttcccgcaccatgaaaacgagattgcccagtctacctgcgcgcatgacggcgaatacgtcaactactggatgcactccggtatggtgatggtggatcgcgagaagatgtccaaatcgctgggcaacttctttaccgtgcgcgacgtgctgaaatactacgatgcggaaaccgtgcgctacttcctgatgtccgggcattaccgtagccaactgaactacagcgaagagaacctcaagcaggcgcgcgcctcgctggagcggctatacactgcattgcgtggaacggataaatcagcggccccggcgggcggcgaggcgtttgaagcgcgtttcgtggaggcgatgaatgacgatttcaataccccggaagcctactccgtcctgtttgatatggcgcgtgaagtcaaccgtctgaagggcgaagatatgaccgccgcgaatgcgatggcgtctcatctgcggaagatttccggcgtgctgggactgctggagcaggagccggatgttttcctgcaaagcggcgcgcaggcggatgacggtgaagttgcggaaattgaagccttgattcaacagcgtctggatgcccgtaaagcgaaagactgggcggcggcggacgcggcgcgcgatcgtctcgctgaaatgggtattattctggaagatggcccgcagggcaccacctggcgacgtaagtaagcgcttttacaggccgctctatttgcatagaacggcctgttttttattttttcgcaccgggcgaaagataaacacacaccgactcccccagattctgatgttcacacccgggtattgcccggctgtaatgggcaataaagcggatgacgctgtcgccgctgtttagccccacatttccttttcgcagcaattctgctggctgatcgtcggtgaaaacgttaggggtgaacagttttgcgcctaatcgttcaaaagtgccagcactaacgatagagggttgataaccctgaagctgcaaccagcggcgggcatcattacgtgaccaaacctgcgcatcgtttgctcgcgcaaacacttcgagaagccagccattcgaattctgataagggccggaaaaaggccacgcaattaggttatagcggggactgtggaagagattgagtttgatagcgctatgtaagagcgtttgtaatgccgtcgcgatatctgaacgcgggcgcaaaacggcaatgctctgattcaccaggtcatcagccagaaactcatacagaccttgtatatagagcgctgattcagcggttccgcaagtattcagattatggtaaacccgccagtctccgtttggctggcgcatggcatagccagcatgtgaccaggttaaatgtcggctcgacatatcttgcccctggcgaaccagaatgacgaccggatcgggttgactgttaagctgttgtttgagctgtagcgcctgatccattgtcgctgcgatgctctccggcgtgtttgctttttggtgacagttagcactgtctgcataagcgttgagcgagattgcgctgagccacagggcaaacgcgaaccgcttcatttggccggtaccgtctggttgctggaaagtcctgcgtcgtcctgatttaccatatgggcaaggactttgccctcttttttcaaataagcgccggtgccttcctgcgttttttccagagtgactttatcacctgctttgaggttgccttctttgacgacatgtagcggaacttgcattttaatgtctttgttatcgggggacttagtggttaacagcgcggttttttgctttttattttcgacaacagatccaatgctcaggttgagcggcagcagtacgggggagagtataattccgctaaccagtgcggaactgcccacgctgacaaccgcagacgatgccgcataccagccagtggcagacatttcttcgctatagctggcgtgggaaaatgagaaacagatgaccgcggcggcgaatgtcattttattcatattgattccttttaatatgcgttttaagtacccatagaaataacactaaaatacttcccggcaaccacacccacagcaattctgagagaatgacctggtgtccatacggcgtgatgtagcttgaaagcgcgaacggcgcgactttaatcacctgccagggcgcaaaaaaacgttcatctgaccacggccacagccagccaacgcctttcccacccgtggttatcgaatccagcaggctgtgcgacaacaatgaaacggttaaaaacagccagcagcgcacctgcccagctcgaaaccatcgtcgtcccgcgagtacgcacaacagggggaggacgaatgcgaaaagtaaagagtgggtaaatccgcgatggccaaatacgttgccgtaggcgacgccaaatttaaaggccagcacgtcggcatcggggagcatcgccagcacaacaccggcaaacagcaggcgaggagggataactttcaggcctaagcctgcgccaaaacacaggggaacggcggcgtgggtgataacggtaggcatagcgatcgttcacagggaaatagccatgctagcagttggaacgcagaggattaagtggatgattatctgaaaagacagcgtaatcaggccggataagacgctttgcgtcgctatccggcactctgtatcaggccacgacgttcacactttggccttcaaagctaacggtttgcccggcgacaattttgcagcgtttacgcgtttcaaccgcgccatcaaccttcaccaacccgtcggcaatggcgattttcgcctgcgcgccgctttcgctccagccttccagcttgagcagatcgcacagctcgacgtgcgggtgcttgcctaaagagaatgtcgccatattattttccttgtggatcgtgatattcaatgcacgcctgcagcgtgttttcgataagcgtggcgaccgtcatcgggccgacgccgcccggtactggcgtgatgtatgacgcgcgcgccgcggcttcgtcaaacacgacgtcgccaacgaccttgccattttccagacggttaataccgacatcaatcacaattgcgccttctttaatccattcgccgggaataaagcccggtttacctacggcgacaatgagcaaatcagcatgctcgacatggtgacgcagatctttggtaaagcggtgcgtaacggtagtcgtacagccagccagcaacagctccatgctcattgggcgtccaacgatattggacgcgccaatgaccaccgcattcaggccgtaggtatcaatattgtaacgctcaagcagcgtcacaataccgcggggcgtacagggacgcaggcgtggcgcacgctgacacagacgaccgacattataaggatggaaaccgtctacgtctttatctggcgcgatacgctccagcactttaacgttgtcgatacctgccggtaaaggcaactgcaccagaataccgtcaatcgtgttatctgcattcagagtatcgataagcgccagcagttcggcttcgctggtggtttctggcaggtcataggagcgggagacgaaccccacttcgtcgcacgctttacgtttgcttgcgacataaatctgtgaggccggattgctgccgaccaacaccacagccaggccgggagcgcgaagacctgctgcgacgcgtgcctgaactttttgagcaacctcagatcgcacctgctgcgcaatcgttttaccgtcaataatctttgctgccatcagagagaagattccatctgttacttcaagtcaaaggggatgacgctattttgtcagaagcgggcctcgctgtcagttaacgtttgtgtttccgatgcaaacgcgacgtctcccccgtctgttgacgatactgagacgtggcccgtaagcgcgccatgattaaccaaaaagaaacaattcatcaccctggctatggttaccgtaatccctcgtcgttaatagcatcgggcggcataatgcgacattttatacaaaataagattagacccttcttatatcccaataagaattagcttaggtcattaaaagagtttgcggctattttttatttagcgaaatgtttaatttattaccgtgacgaaatgtcatattcgcaaagattaattactgcgtctgatactcaggggagaaacagaaaactaattaatctgcgatatctatctttacaggatgcagagataacttttctgacatgctatgtcgataataattcaaacggagccgacaggatgccgaaaccgggtgtgtgtaattcaagggaaatccatgaaacataaattaatgacctctactattgcgagtctgatgtttgtcgctggcgcagcggttgcggctgatcctactccggtgagcgtgagtggcggtactattcatttcgaaggtaaactggttaatgcagcctgtgccgtcagcactaaatccgccgatcaaacggtgacgctgggtcaataccgtaccgccagctttacggcgattggtaatacgactgcgcaggtgcctttctccatcgtcctgaatgactgcgatccgaaagtggcggccaacgctgccgtggctttctctggtcaggcagataacaccaaccctaatttgctggctgtctcctctgcggacaatagcactaccgcaaccggcgtcgggattgagattcttgataatacctcttcaccgttgaagccggacggcgcgaccttctcggcgaagcagtcgctggttgaaggcaccaatacgctgcgttttaccgcacgctataaggcaaccgccgccgccacgacgccaggccaggctaatgccgacgccacctttatcatgaaatacgaataatcccgtcagggaacgccagggaagggaggcgcctcaacggaagaggctatcggggataaatagagaacatagcagatgataaggaaaggcgcggcgctagcggggcttgttttgatgtcgcccgtcattgcgcagccggtaatggtggagagcgggcgtgttcacctgcgcggacaactggtcaatggcggctgcgctgtcgccacagaaagccagaatttgcgcgtattgatgggacagtaccgcacgaatgcgtttaccggtcctggcagcttcgctcccgtcagcgttccattttcgttacggttaatctcctgtagcgcggaggtctggcgtcatgtcggcattgcgtttgccggcgttacgcctgcggaagatccccatgtttttctggccagcggcgagggtatcggtaatgccggaatcggcctggcattatttgatgaccagcagcggcaaatcatacctaacacgttaccgcttcattacacgcccattttaacgtcagaaatgactttgcattttactgcccgctatcgggcaatttcagaaaatatgacgccgggacgaattcattcagaagtgtggtttacgctggtttacccatgaattttcttgccgacgtgactcaatgcaaaaggtattttttaccatgctgaatagtataaaagtaggctttattgttcttctcacgttatttacttcgctgaacgtacaggcggcgggggggattgcattaggcgccacgcgcgttatttatccctcggcggcgaagcagacttctctggcaatcagtaatagcgatactcaagaacgttacctcgtcaattcatggatcgaaaataacgctgggcagaaagaaaaaacgtttatcgttacgccgcctttattcgtcagcgagcccaaaagtgaaaacacgctgcgtattatctacgccgggcaaccgctacccggggatcgggagtcgttattctggatgaacgtgaaagccatcccgtcggtcgataaaagtcatattgaaggaaaaaacgttctgcaactggcgattctgtcgcgcatcaaactgttcgtgcgtccggcgaatttgccgcagacgccggaagacgcgccgaccttgctgaaattttcccgtgtcggcaaccatctcaagataaccaacccatctgcttattacctcacgctggtcaatatcagcgtgggcgcgaaaaagattgataacgtgatgatcgcgccaaaaagcgacatgcaaattcccttaccgactggcgcgcagggcaacgtgacatttcagtccgtcaatgattacggcgcattgacgtcggcgacaacggccagtctcggttaagcagagagcgtgaagccacacgagaacacgatgaagaagacaacctggtttgcagggcgatttcccggctatgtatcaccgttaagcagcgtggcgctgtcggtgctggcggcgctgtgtccgctgacgagccgcggcgaaagttatttcaaccctgcgtttttgtcggcggataccgcgtccgtggcggatttatctcgctttgaaaaaggtaatcatcagcctcccggtatttaccgggtggatatctggcgtaacgacgaattcgtagcgacgcaggatattcgttttgaggcgggcgccgtgggcaccggcgataaatccggcggcctgatgccttgttttacaccggagtggattaaacggctgggcgtgaataccgcggcgttccctgtctcagataaaggcgtcgataccacgtgtattcaccttcctgagaaaatcccgggcgcggaggtcgcgttcgatttcgcgtcgatgcgcttaaacattagcttgccgcaggcgtcattgctcaacagcgcgcgtggctatatcccgccggaagagtgggatgaagggatacccgccgcactcattaattacagttttaccggtagccgcggaacagacagcgatagctattttttgagtctgctgagtggcttgaactatggcccctggcggttgcgtaataacggagcctggaactattcgaaaggggacggctatcattcgcaacgctggaacaacattggcacctgggtacagcgcgccatcattccgctaaaaagcgaactggtcatgggggacagcaataccgggaacgatgttttcgacagcgtcggctttcgcggagcgcggctgtactcttctgacaatatgtatcccgatagcctgcagggctacgcccccacggttagaggaatcgcccggacggcggcaaagctgacgatacgacagaacgggtatgttatctaccaaagctatgtgtcgccgggcgcgtttgcgattaccgatcttaatcctacctcttccagcggcgaccttgaggtgacggtagatgaaaaagacggtagccaacaacgttacacggtgccttactctaccgttccgctattgcagcgtgagggcagggtgaagtatgacctggtggccggggattttcgcagcggcaatagtcagcagtcttcgccattctttttccagggaacggtgattgccggcctgcctgcggggctgacggcttacggcggtacgcaacttgccgatcgttaccgtgccgtggtggtcggggcggggcgaaatttgggcgactggggagccgtgtcggttgatgtcacacatgcgcgtagccaactggcagatgacagcacccatcaggggcaatcgttgcgttttctgtacgccaaatcgctgaataattacgggactaattttcaattgctgggttaccgctattccacgcgcggattttacaccctggatgatgtggcatatcgcagtatggaagggtacgactacgaatacgatagcgacggacgccgccataaagtgccggtggcgcagagctaccacaatctccgctacagcaaaaaaggccgctttcaggtcaatatttcgcaaaatctgggggattacgggtcactgtatctttccggcagtcaacaaaattactggaatacggcggataccaatacctggtatcaactgggatacgccagtggatggcaaggcataagttattcgctgtcatggtcgtggagcgagtcggtggggagctcaggcgccgaccgcattctggcattcaatatgtccgttccgtttagcgttctgaccggacggcgttatgcgcgcgacactattcttgatcgtacttatgccacgtttaacgccaaccgcaaccgcgacggcgacaatagctggcagaccggcgtgggcggcacacttctggaaggacgtaatctgagctacagcgtgacgcaagggcgtagcagtagcaatggttatagcggcagcgccagcgctagctggcaggcgacgtatggcacgctgggcgtgggatataactacgatcgcgatcagcatgactataactggcaactttccggcggcgtggtcggtcatgcggatggtattacgtttagccaaccgttgggcgataccaatgtcttgattaaagcgccgggagcgaaaggcgtgcgcatcgaaaaccagaccggcgtgaaaacggactggcggggctatgcggtaatgccctacgccacggtatatcgctataaccgcgtcgcgttagataccaacacgatggacaaccataccgatgtcgaaaataacgtcagcagcgtagtgccgacagagggcgcgctggtgcgggccgcttttgatacgcggataggcgtaagggcaatcattaccgcgaggcttggcggacgtccgttaccgtttggcgcgatagtacgagaaaccgccagcggcattaccagtatggtcggcgatgatgggcaaatttatctgagcggcttgccgctaaaaggtgaactgttcatccagtggggagaggggaaaaacgcgcgttgtatcgccccttacgccctggcggaggatagcctgaagcaggcgattacgatagccagcgcaacctgtatccgtccggcgtcataaaaggaaaaatagagatgaaaatatactcagcgctattgctggcggggaccgcgctctttttcacccatcccgcgctggcgacggtttgccgtaattcaaacgggacggcgaccgatatcttttacgacctgtcagatgttttcaccagcggcaataatcagccgggacaggtggtgacgctgccggaaaaatcaggttgggtcggcgtaaacgcgacgtgcccggcggggacaacggtgaattatacctaccgaagctatgtatcagaattaccggtacaaagtaccgaaggaaattttaaatacctcaagttgaatgactaccttctgggcgcgatgagcatcaccgatagtgtcgctggcgtattttatccgccccgtaactatattctcatgggcgtcgactataacgtgtcgcagcaaaagccgtttggcgtgcaggactcaaagctggtttttaaattaaaagtgatacggcctttttttaatatggtgacgatccctcgccagacaatgtttaccgtctatgtgacgacctctaccggcgacgcgttgagcacgccggtatataccattagctacagcggcaaagtggaagtgccgcaaaactgtgaagtgaatgccggacaggtcgtggagtttgatttcggcgatatcggcgcgtcgttatttagtcaggcgggggcgggtaatcgtccgcaaggcgtcacgccgcaaacgaaaaccattgctatcaaatgtaccaacgtcgcggcgcaggcctatttatcgatgcggcttgaagccgaaaaggcctcagggcaggcgatggtgtccgataatccggatttaggctttgtggttgctaatagcaacggtacgccgcttacacccaataatttgtcgagtaaaattccgtttcatcttgatgataacgccgccgctcgcgtaggtattcgcgcctggccaatcagcgtgacggggattaaaccggcggaagggccgtttactgcgcgcggctatctacgagtcgattatgattaaggaggcataatgatccttcggcgcgttttcatcgctatcggttgtgttttgttcagcccgctgagtcaggccaactcatctctgggcgaagtgaatattgaactgcgcggtaacgtggtggattttacctgcgccgtggtggcgggcgacagtaacaagtcggttaacctcggcacctggccgacaaaacagcttcacgccgccggtgacgctacgcaaccggtagcctttagcctaaaacttgaaggttgcccgccggggtcggcgtctataacgttttccgggacgccagcgcccggcacggcattactggcgcttgctgatacggcaatggcgcaaaaactggcgattgaaattcgcgatggcgatcaacgtcgattgccacttgaacaggccagcaaggccgtcgatattgacaacaacggcaatgctaccctgaaattctatgcgaactatatcgccttagccgatggcgtgcagcccggacttgctaacgcggatgcgaccttcctgatcaattacaattagtgtccgttattgtggctcccgaacgataattcgccgggagtacatttacaataattcgtgtgatttggcgtaatcgataagctcaacgatagagtgaaggccaagtttagaaaatatattggccttatgcgcgctgatagtcttgttactcaataaaagttgctcggcaatttctttgttagacattccattggccagatagcgcagcacggtaacttcgcggttagatagtggcatatcatggtgcccgcctttgggggtacgggtattactgatgaaattaagcgtctcagatgggaaaaaagaatagccggataaaatcatttttaccgcattataaatatcattgaggtctttgcgtttacttacaaatccgtttgcgcccgctcttattgctcttccggcataaaaagcctctgatttcgacgataaaaaaagtatccgggtatgttcctggatagatttgattcgtttaagtaaggtaaagccgtcggtgcccggtaattcaatatccagaatgacaaggtcaacaggataagtgcgcagatactctatcgctgttcggctatcatccgttttcaggacaacctgaatattgctatttttaccgagtaaaacttcgatcgacattcttacaatagggtgttcgtccataatgataacagatgcaggtttcattgttgtatgcctcagactgttatgcgtccttcgttttataataagcgtcagacaccttaaagattgtgaaatagccagatctacacaccacacagtggagcaataataaagaatgagacctccctgttgactggctattttgcgtaagagtaataaatatgtggaatatccatttcgcaccaacaaaaaagaaatttctgattaagtaaaaacaatatggattatacctggtctgatttctcggaaaagtcttgcgaaatgcgaattatggatagcgggtaggatattctgtgacgttatagaaaatttgttcgtggtggagctattttctttagagttgacattgagtagtttaaactgttgtttttaagtataaaaataatatgaaagactaattgtttagtatttgttatgtaataacagaaagatgttgacgctggagacctcgaaaaacgaggaggaacaggggacgatgtaagaaaaaaatttttatcgcttaccaggacgagttgtaaatattaattttatgtgaaatatttacatttaatggaagtgaaaataagtaatttcttaaaaaatcttattcaccaaaacgttacttcgttaaaaaatgtcgtggaaagtaacgtttagctgctggatcagccgaagaaagctttgcctgtggggaaggttaaggagggtgataagttgtttaagccggtaaactacacgatgataaggtacgctttgctgacgtgctatttcttttaaagaggcgccttgcgctaaagtttcaatcatcaaccagtcagtacggctaaagctttccgataagcgaggtttggaggctgataacaaggcttcgcgtactgaggccagattttgtcgtcgcgacaggacaaaaaaacgcccagccatacggataaactgtgttatagcggaggttttatctgataccagcaggtaaatctggatatcgctttgttgccaactgagcgcgcgtagctggttaagcgcctcaatacaggagacaggtagcgcctccatatctacaatcagttgtctgagcgaccccttttcaatccacaaagaaatgtcatctaatgagcggaatgctgcggtacgttttccggaaaataagtagtgactcaatgaatagccgaggtagttgtcagttgtaattattgcctgagaaatgataccaaccggcaaggcataattgagctgttggttcagtaactcaaggcgatcaaatatctgcggcgttggagagtgataacggcaggcgcagtctttagcatttcttaaacggcggtgtctttccctgcgtggtacgctgcgcatcctgctttttccattgctctaatatatatctggtaatatggctggccataaataaccttgttccatcgttgcaccagcgtaaaaagcaatgcttcgttgctctgatgtttcaatgccttccatcagcattaactgctgaaaaaaaacttcgctatcatgttctgacggaagttgcgtcaggacctcatagccgattaattgcgcagttgagagattaacgattggctcagattttaacaattcgctgttgagatatgaatgacgtgtgggcgaagacgccaggtgtgggggatttatcctttcctttaacaaaataccctgtgccaccaaacactcctccaggcatttatgatgcagccatatattttcgacccctgaatctatcaggatattatgggcatcattgtggcagcgttaaaaaaatgcctgtaggtatcgttacttaattattggtgagatatttcgtaagccttgtaaaaagttaagtgagtttacttactgagtaagaaatgaaggttaactctaatatattttaaaaactgctgctccgttttaacatgtaattttcgcataatgctccggcggagtgactttgtctgctcttcagaaagtgaaagtaaagcggccgtttcgcttaaatgataaccgctggcgatcagttttaacaggtgacgttctgttactgaaaaatgacgagtcgtgcagtagtggcaaatgccagaagggacgctatgtcgaagcgctcgtttatgtaagatcaatatcattttccgggtaatttcttcaacatcatcttcccgataaatatgcggcagcatatacagacatggtctgaacatgagcttttctttatcgcatttattacaaataatcgcccgtagctgatgttgggtatgcataggtatctgataacagccagcgctgaaccaatcatcatccagggccaggaaagcgatatcggcattatctatctcttctggcggcagaaagtcaattttctgctgccattgattcgccagacgcgtcatgatgattttcaacccatgctcaaagtgactgttttgttccttaatagcgatacgcagcataaaaaaatatcctacacggcaggtgaatcatggtgaaatattaaagaaactgattgattttctaaatactggcggccttaattcccactttatgcgtgctgagatgtgtccaggcgatttcctggaacctggcattgcgccagaaaagacgatattcgtacacttagtcagcaaccagaacaaaagccattgactcaggagtgcctgaccgtataattctcgcgtttcgtctacacgaagtcttcacttcacaaggcgcccttagctcagttggatagagcaacggccttctaagccgtgggtcgcaggttcgaatcctgcagggcgcgccacttataaatcaacgtgttacgcttctttatttcctccttattttccatatgggacatatttgggacatcatcaccaaaaatgtcgtctattttcctcgcgtgttccgttaaatgattaggtgcaaggtgagcatatctgtgaatcaccacggataacctggacacttctgagtcgttgatgatataggttttcatattcagccggtggcatctgctcgctcgaaccatgccggcgtctactgttataaaacatttctatgtaatcaaaaatatcgcttctggcttcgtctctcgttccgtagatcttttcctttatccgttcacgcttcagtagctggaaaaagctttctgcaaccgcattgtcatgacagttgccacgacggctcattctgctctccagtccgtgcggtttcaggagcgactgccattcatagcgggtgattacgtcgccacacggccatcagaagcgcattcaggactctatcttttgtcattcatggttgcagtgaccaattgaatctattgcggcttttttttatatgtcccgctcgtcagtaacccgcttcaactctttcgggagtcggcggattccggtctgatcatctgactgctctttatttctttattggtggaggagttcgacccgtacttctttatcctggcgtaaagactgtgggtagtaatatcgagatgtgttgcggcgctggaaacagaatggccacgctcaacgacctgtcttaccgcttcaattttaaactcttcgggataacgtttaccgctcataggcacctctctttaagtcatcttaaatggctctgaggtgtctgttaaacctgtggcgattcacattgaccgcagattgtcaggttcctttacccggtagtgaaaccagtagggggcagtttatccgcactaaaagacggtgttcctgcatctgtggtggagttgaaccggatgggctttgggcacatgcgtatccttgcgtgtattggtcagttgccggagtctggattaatgcactatggctccgttgggttcttttttgggactgatggtgcattgcgacttcttgctaagaaacctgatggggcatttgtgacatacgatatgtaggaatccccgccgcccgttacccattggtggcggggaacattaattatacatgaatgttatttaattatttccgtaatattctcatttgtcctcgcccctgttctaacgtcccatgtcccagatgtaattgattctaattcatttgaatctatgccgttaatcgcccgcccggaaagccatcttccgtctatttggaatgtcttcttgtcgacatctgcatttataatttttccatcctttgttttaaagctaatgaacatcgctgtattctcatcaagagaatcagcaggatttttattaaactcaaatattacaaaggttttaatgcccatttgctgtttatatatccataatgattttatataaacgttgttacatatttttgcgttaatattaagaggcttgaaattaaaggctcgtgaatagtcgaaaaatcctggagcagttattttcaaatcaatcccgtagtatctagacattgcttcactgttaaacgtatcaagacttgggcctgcatgcagtaccggtggaaagtaataatcaggaattatcgcttgatcttgtttgttatgtttcgccctgtctattatttcttccctaatctccgtttgtttgcttattgatttaattgatgagtaatagaggatgtatgatgggatgaaatataaaaaagccattgcatatgtagtaacagataaataaatggaagccttgttaaatttcgtaaatgcagaatgagcaacaaaggaaatcgaaagaatcataaagcagagtgctccattgagagccctgctgggcattgcaggagatgcaaggaacgcaacatttgcagcaattgcacccagcatgaataaaaagcttccaaacataagtttgctgctactattccttgataacactacagagattagtagtattataaatgcaatatagacctgccaatatgcccccattgctgatggcagcctttctgaaaagtgctcaagaaccctccatgcaagtggttgattgtaccagtcttgtattgtagacgcacgggataggtttcccggagccagcaggagaacccccgcgcctattgcagatccgaatacgccaatcagtaaatatttatttctattcattataaagaaatatgctacagaaattaatacaactacaagagatgtattttcatttgagcaacctgcaaatatcgatgatatggcatatacaaagagtattaaattggattttttaccattgcttaaatatatagaaattagtatataaatggcaatgaacatgttggtccataagtaatttgctgacccaacaagccagaagttagtttgaccgagggctggatttgcaacgaagtataagaaaaataagaaaatcatcacatatggggacggtgacgactttgttaatgtagctgggatcattgtccagcacaacaccattaatgttagcgctgctgagtttattgcattgtaaatatgcggggagaaaaactttaatagagatgtgctgatcgtatctgacacaacccttccgctccatcccaaatagtgcatttttacgctagaaagcgaaagctctcttagggcataagtatagtcatcagagttcattggtgtgataaatcctattgaatacaccaacgagaaaactataaggatagcgattaccatttttaatctattgttaaccatttttcttctcattcttaattatgtacttaggccttttttttgtttctatgtaaatcctgccaatatattccccaagaatacctattcctatcaattgaacgccacccagaaaaagtacagaaacaagaagagacgggtagccaggaacattatttccaaatattaatttatcaataatcatccatgcaccgtaaaggaatgacatacctgcaataaacaatccaatgtaagtccatatgcggagcggaaatgttgagaaagaagttattccttccagcgccagattccataatttccagccattgaattttgaatcgccggcaacacgctcagcgcgggcgtattcaactacatcagtcttgccgcccacccatgacagaacgcctttcataaacagattacgttctggcatctgtttaatattttcgacaacctcacgactcattaaccgaaagtcgccaacgttctcttcaattttcggattgctgattttattatgcagcttataaaaccattcagctgtcttacgcttcatgcgcccgtcagttgagcggtctgagcgcttagccagcaccatatccgcgccagcctgccacttctcaatgagatgggggattacttctatcggatcctgtaaatcgacatcaataggaatgaccgcatccccggttgcatggtcgagacccgcgaaaagagcaggttctttaccgaagtttcgcgtaaacgaaagcggaataacgagcggatcagatgcagctattttgttaattattgattcagtcgcatctttgcttccatcgttgatgaaaacaatctcaacttcatacggttttagctcttcaaactcgcgaaccgttttatagaaaataggtatcgtggcttcttcattgaagaccggaacgactaacgagattttcatttcgcatccctaaagacaatgaactttgaataaatgaatccgcatatcaggctgatagctgaaaaggtgacaagagtaaggagtggcggcagggaacatttgtcagccatccagccaacaacggcgctcagtgttcccataaatcccacgtacatcatgtagcgaagcgtggtggtgctggcgttaaaggtgaagcgcgcattggcatagaagctgaacgatacggcgataacaaaaccggaaaagttcgccaacgcctgatgcgtatgcatcccatacacacaaaaagcaaatacgccccaatgaataagcgtgttaagaacaccgatcgatgtgtacttagcgaataacttcaacattatgaaaatcagcggattcggaaaggtctggagtgtagcactacaaattgctttgatcgatataaacgatcaataatgtggtattcaatagtttaaagttattgttatcttattaattgatcgttgttaccgatcaattggggctactgattgctaagtagtttgggacaaaaacgggacacacaaagctttgcatcggcttgcaaggctttgcatgtttttcgaagatggggcgagtgagcgccgtagtaatgggataacttgttgttagctcaggtagttccaggaacatctaagccgtgggtcgcaggttcgaatcctgcacggcgcgccatttaacctctcaaaattacgttaatccgtaagcttctgcggcggcgacgttgcgccatccgcagtacgtgacgctaatatgcaaataactaattgcgtttaatctgtttatggtgctcctcagcctggatctcgtgggagaaagaatgggcattattcatcgattaatggatgaccattgctttttcatagtcgtccatttcagaaaaggatgtcgcattttccacagtagccggggcgctgggtttctgtgtctgagccatttgctgatgcgcgaaggcgtcaccgttattcatcatctcatgtgctgtggcggataattggcgggattccattttctctgcggtgtttacgccagctgaaataaaaaaacgacagctaaaagggatgtaaacttattcatcttatttctccggtgtgggttaataagagaaataataaaacagttgttgggcctggcgcgtgacgggataatgacgattatatcagattattttgctggctagtgatagcgcctttcactatcgctacagttcaacggaggtgtttggggaatgtcaaaataaaacgagtagcgcgtgtatcggaggtgacagaaatttttccccggtgcgcagtgacgatggattttacaattgccaggcctataccgctgccttcccctttacgctggcgggagggatcaacgcgataaaaacgatcgaaaaggagcggcaaatgttccggcgcgattggcgtaccggggttttcaacaataatatgtatctggtcgtccgcttcttttatccgaagagtaatggttttacccggcggcgtatagcgcatcgtattagagagtaaattactgatcgctctgcgcagcatgatgggatcgccggtgattcagcaggcgcggccttcaaagcgcaagctcccaacaccttttcggcagaaaaactcgatgaggcgctttaccacggggcggtgctccgggtgcggccaaaagccatgacggtagcggtgattatcgccggtctgctacctgttttatgggggaccggcgcgggttctgaggtgatgagccgtattaccgcgccattgctgtcgctgttcatcattccggcagcctacaagctgatgtggctgcgcaggcatcgtcgccttgcggcataacgtgtgcaccccgcctgcggcgtcaaactgcaggcgggttcagcgtacgtttatcgtccgagcgcgctgacccgtttgcggtactcgcctggtgtacaaccgaattcacggacaaaagctttgtgaaaagaagattcgctcgcataacctaccgactcggcaatcaccatcaccggcagcacttcacgcgacagggtctgggcggcgatttgcaggcgcagcgttgttaacacggctaagggcgttgtagcggacacgtcgcgaaatagctgggcgaagctcgcccgcgacatgtgtacccgttgcgccagcgtttcgaccgtccagggatgcgccggtgtttccagcatgtgaaggatcacgcggcccagccggggatgcagtaataaattgagcacgcttttcgccgtgccagcctgcgatagccagtcgcgaacggcgagggtaaacagcgtggcgcactgctgactgtataagacatcagcgccaggtaaatggcgttctgactcctgctgtaacagcaaaatggtggcgttaatccagatactggcggggctatgcggcggcggggcaagacataacacttccggcaacgcggtaaggaaataacgtgacgtcgtgtgcagacgtagactaccgcagacgatatgtgtcggtgattcgccagactggcgcaaacggtgggcggagttttgcggcagaatcaccacctttcccggcgtaagcgtcatggcgtcgccggtaggcatttccagttgcgcttcgccctgcgtaacggtatgccagcgaatcaccgatagttcgccagcggcgtgcggcaactgccagtcgccgcctaacgggcaattcttgtcgattgagccctgaggggcgttaagcgtcaatagccgactaagcgcatccatatagactccagaacagatttattttcaaaactagagataaccatttctgtatctgttcactatatttcggactcaatgtcatttctacccttgtttttgctaaccaccaatttagacgataagacaaaaaatggcgcgttgcggataaccctgtcttttttgacgttatttatacttgtcctgacaaacagatggtgatttggcggagaaagaagatgacacagtatcaggcgctcattattggttttggcaaggcaggaaaaacgttggcggcaactctggcgaagacgggatggcgcgtggcgattatcgaacagtccgccagtatgttcggcggaacctgcatcaacattggctgtattccaacgaaaacgctggtgcatgatgcggaacgtgagggcgatttttctgtcgccatgcaacgtaaagcggcggtcgtaaattttttacgcgacaaaaattttcataatcttgccgacctggacaatgtcgatgtgattgagggaagggcggagtttattgataaccataccttacgggtatttcaggcggacggcgagcgggtgttacggggagaaaagatctttattaatactggcgcagagtcggtgatcccggctattacgggcttaacaacgacggcaggggtgttcgatagcaccgggctactcagcctgagccagcgtccggcgcggctggggattttaggcggtggttatattggccttgaatttgcctcaatgttcgccaactttggtacgaaggtcactatctttgaagcagcgccgcaattcctgcctcgtgaagatcgggatatcgcgcaggcaattacccgtattttacaggaaaagggcgtcgagctgattttaaacgccaacgtacaggccgtatcctcaaaggagggcgcggtacaagtagaaacgccggaaggcgcgcatcttgtggatgccctgctggtggcgtcggggcgaaaaccggcgacggctggcttacagttgcagaacgccggcgtggcggtgaacgaacgcggcgggattatcgtggatgattacctgcgtaccacggcggacaatatctgggcgatgggcgacgttaccggtgggttgcagtttacctatatttcactggatgattttcgtattgtacgcgacgggttattgggagatggcaaacgcagtacccgcgatcgccagaatgttccgtattccgtctttatgacgccgccgctctctcgtgtcgggctgacggaagaacaagcgcgggcaagcggcgcaacggtgcaggtggtgacattaccggtggcggcgatccctcgcgcccgtgttatgaacgatactcgtggcgtactaaaagcggtagtggacgtgaatacgcagcgtattgtaggggtgtcattgttatgcgtcgattctcatgaaatgattaatatcgttaaaaccgttatggatgcagatttaccttatacggtgttacgcgaccagatatttacccatcctacaatgagtgagtctttaaacgatctcttctctctcattaagtaaaacataaataatatagccctgttaatcagggcttttttttgcctgtcagaccataaaaatacgccaggacaaatatgctggcgtctgaaagaaaaggctttagtcaggcataacgtattataacaccattgaaataacccacgactggaaatctcgatgttaaaagttaccacacttattgcttcattattggctgcgccgctggcgttttccgcttccgcccagccgctaaccgacgttgaatatatcagcgtttctgcggtgtcagcaacgccgtcaatgcttgaagatgctattgccagactggcgcaaagtaaacaggcgtcgtcatggaaaattacgtcaatgcgtattgataatacgggttacgccactgcgatattatataaataaggagagtctgagatggataaatatcttcgtctgttaagtcagggggatcggctggggttaacattaattcgcctgagtatcgccatcgtttttatctggattggactactaaaatttgtgccctatgaggcagacagtattaccccgtttgtggcgaacagcccgtttatgtcttttttctatgaacatccggaagaatatcgtcagcatctgactcatgagggcgaactaaaaccggaggaacgcgcctggcaaaccgccaataatacgtatgcgttttcggatggtctgggcgtggtggaattgattatcgcggcgctggtactggctaaccctgtcagccgttggttagggctggcgggcggcgtgctggcattcctgacgccatttgtcacgctgtcgtttttaatcaccacgccggaggtctgggttatgccgctgggcgatgcgcattatggttttccgtatttatcgggcgccgggcggctggtattaaaagatacgttaatgctggcaggtgcggtgatgatcatggcggactccgcccgttcgttacttttacagcgacagtagcgaccctcttaccctctttatgccgcgattcgtcgggtggcgcttgcgccatccgacaatgtgttgatgaatgatggactaccctgacagaagttcctgttccacctgttgaacctgcgcctccagcgtattgcgaatttcggttagcgcccgttcctgctcggagaaataggcttccttatccgcaacggaagaggcgagccgccaggcattttccgtttccagttgcgttatctctttcaacagcgcgtcgatttgcgtgcggagctggcgtattttatggcgcagatgttccaggttattgagcctgtcgcttgccatcatcggttccagaccgctttgcaactgtgtcagtaacgcgcgaattgccgccagatcggcattctgccgcgcctgattaagctgtaccatcatctggtgcgctttttcttttaattcatcggcgaccacatccgggtgacacaggcggctggcctgacgccacaaacgttttaattcactgcgttcgtctgccgacaaacgttgatcgcgggcgtagcggaattgcgcttcctgctgctgctcccgatactggtgatagtcctgttccgcattttcctgcgcctggcggaatgcgctgtcgtcctgatgggaaaaatccgcttccagctcgcgaatttccgccagcaacgcggtgattaactccgtctgctgctggattcgctgacggatgcccaccgcttcgcgcgaggcggcattcaatcctgtccactgctgttttagcgttgccagttgatccacggcctgggaaataaattgcaggcaggattgataatccttttcccggcgttttatttcggcttcttgcttacgctgcatactcaccgcgagctgtttacgcaactccagaatacggctcatcaacggcccgagacgcagatgatagaggtcgttgaaatcgtcgaggatttgtacccgcgcatttcgtttgtcaatcagatcgcgaagttgggcttcaagcgctttcagctccagtttactggcggcaatagagggatcttgccacgtcgagagcgcccgttgagcctgtagccaggcggcgatctcttgcatggcgtcactgaatcgacgagcttcaatcgcctgggcaatcgcgctgattacggcatcctgcggctcatttttcaggtagatgagctgctgacggataatctcttcgtcctcaagttcgatggcgcttttgatgatctctaaacgtttgatgatcttattcatgacgttgatgcctggcgtggctcaaaaacggataacagataccaggtctgattcacctttttgaaaatactgaaaaaatactaaatgtattctgtagggtgtcgtacttttcgtccagagttattcacatattttatacccggcgtctgtcacccgtaacgttctatatcggcgcgcactcttttctttttactccccacgacatctttttttacacgataacgttaacgtccggagttgagccttgacaaacgattgcgccttgcggcagcgagagcgaaatgttaaaaggtgcccctcaataaaaacgatacaggggtaggacgtgaaaaacgcgtcaactgcatccggcgccagcgtgtcggatgccgcgtcgaagaatgaaccgacgcttcaacgggggttgcaaaaccgccatattcagctaatcgccctgggcggcgccattggcaccggactgtttctgggcatcggcccggcgattcaaatggcggggccggctgttttgttgggctatggcgttgccgggattatcgcttttctcattatgcgccagttgggtgaaatggtcgtggaagagccggtttccggatcgtttgcccacttcgcctggaaatattgggggccgtttgcgggctttttgtcgggctggaactattgggtcatgtttgtgctggtcgggatggcggagctgaccgcggcgggcatctatatgcagtactggctgcctgacgtaccaacatgggtatgggcggcggcgttttttattatcattaatgccgtgaatctggtgaacgttcgtctgtatggcgaaacggaattctggttcgcgctgattaaagtgctggcgattatcggcatgataggttttggtctgtggctgctgttctccggccacggcggcgaacatgccagcattgataacctctggcgttataacggtttcttcgctaccggttggcatggtttgcttctgtcgctggcggtgattatgttttcttttggcggactggagctgatcggcattactgcggcggaagcgcgcgatccacaaaaaagcattccgaaagcggtgaatcaggtggtataccgtattttgctgttctacatcggttcgctggtggtgttgctggcgctctatccgtgggtagaggtgaaatccaatagcagcccttttgtgatgatcttccataacctggacagtaatgtggtggcttcggcgctgaatttcgttattctggtcgcgtcgctttcggtgtataacagcggcgtttattcgaatagccgaatgctgttcggcctgtccgtacaaggcaatgcgccgaaatttttaacccgcgtcagccatcgcggcgtaccggtgaactcgctgatactttccggagcgattacctcgctggtggtgctgatcaactatctgttgccgcaaaaagcgtttagcctgttgatggcgctggttgtcgcgacgctattgctaaactggataatgatctgtctcgcgcatttacgttttcgcgcggcgatgcgtcgtaaagggcgcgagacgcaatttaaggcgctgttctatcccgccggaaactatttgtgcattgcgtttctggcgctgattctggtgttaatgtgtacgatggacgatatgcgattgtcggcgattttgctgccggtatggattgtattcctgtttatcgcgtttaccgttttgcgccgtaaggctcattaacttttttgcccgatcccatgttcatgcgatcgggcaatccattaatgccgcaatgtccctgacagcgcgcgaatatcgctgccggtcggcgtctgatgaatacgcaagccaaactcttccaccacggcaaaaatatggtcgaaaatatcggcctgaatgctctcatattccagccacacgacggtattggtaaaggcgtagatctctatcggcaaaccatgatcgtcaggcgccagttggcgtaccatcagcgtcatgtctttacggatgcgcggatggtggcgtaaatattcgttcagataggcgcgaaatgtcccgatattggtcatgcggcggtgatttaaggctgattccggcgcatccagttgtttattccattcatcgatttcctgatgacggctggtaaggtacggctttaacagttgcgcggttaacagccgctgtttttcatcatcatccagaaaatggatactggtcgcgtcaatattaatgctgcgtttaatccggcgtccgccggacgcagacatgccgctccagtttttgaatgagtcggaaaccagcgaccaggtgggaatggtggtgatggtattatcccagttgcgtacttttaccgtggttaagccaatatcaatgaccgcgccatctgcgccatatttcggcatttccagccagtcgcccagtttgagcatatcgttggcggaaagctggataccggcaaccaggccaagaatcgggtctttaaagaccagcattaataccgcggccatcgcgcccagcccgctgattaaaattgctggtgactggccaatcagcagtgagatcatcagaatgccgacgataattgcgccgatgagcttaataccctgaaatattccttttagcggtaactgagaggcggcgggccatttttgcgatagattgaaaatcacgtccagcaaggaaaataacgacagcagggcgtaggtcataatccataactgcgcgcaggtcgtcaggatatccgcagcctcactgcctttttgtagccagagcgcggcctgaatattgacaatgatgccttgcagcgtaaaagccagacgatggaataatttattctgggtaataatttgcagccacaggcgggaactggcgctggcacgtttttcgaaagcgcgcagtactatccagtgcaaaataatatgcacgacaactgctgtcagaaaaataataccaaatatcaccaccagcgacgtggtgtgattcatttcaattcccgctaaatcttctacccgggatatcaattcctgcataatctctcctttataaacagcagcctatgatgactgctgaatggcatttatgcaaatcaggacgcctgcgcttcaggcataatcagcaacagacgggtaaaagcgcctctggggttatccatacgctatattttatcctgcgccctgtaaacgtcgttattttacgcggttccctctttttgaacaggcgccagtccgtcaacaatgaatgaaaactttttaaccagaatgtttaaaacgattgcaatatctctgtcggataatgattagcaccgtcgtacctatcaacaataacattaaggaacatcggatgacccaaaagcgtaccctgctaaaatacggcatactctcgctggcgctggccgcgccattatctgcctgtgcgtttgactctcttacggtgattggcgatagccttagcgataccggtaataacggtcgctggacctgggatagtggtcaaaataagctctacgacgaacagttggccgaacgatatgggctggaattaagcccttccagcaatggcggctctaattatgccgccggcggcgcgacggcgaccccggaattaaacccgcaggataataccgcggatcaggtacggcagtggcttgccaaaacggggggaaaagccgaccacaacggtttgtatattcactgggtcggcggaaacgatctggcggcggccatcgcgcaaccaaccatggcacagcaaatagccggtaatagcgccactagcgcggcggcgcaggtagggctgttactggatgccggcgccgggctggtcgtggtgccaaacgtaccggatattagtgcgacgccaatgattctggaggcggtaatcaccgctgggctgggcgcagcggcgcccccggcgctaaaagcggcgttagatgcgctggcggagggcgctacgcccgatttcgccagtcggcaacaggcgatccgcaaggcgctgctggcggcggctgcaacggtaagcagcaatccatttattcagcaactgctcgttgaacaactgctggcgggctatgaagcggcggcagggcaggcgtcagctctgaccgattattataatcagatggaagagaaggggctggagcaacacggcggcaatatagcccgtgccgatatcaacggcctctttaaggaaattcttgccaacccgcaggcgtttggtctgacaaataccgtaggtatggcctgcccgcctggcgtatccgcttcggcgtgctcctcggcaatgcctggatttaatgcgtcgcaggactatctgtttgccgatcatttacatcccggtccgcaggtccataccattattgcgcaatatattcagtcgatcattgccgcgccggtacaggcgacatacctgaaccaaagcgttcagtcgatggcgcaaggcagtcgtaccacgcttgacagccgttatcagcagcttcgccagggggaaaatcctgttggttcgctgggcatgttcggcggatacagcgggggatatcaacgttatgataataatgaggccgacgggaacggtaatcataataatctgacggttggcgtcgattatcagcttaacgagcaggttctgctgggagggctgatagccggttctctggataagcaacatcctgacgataattatcgttatgatgcccgcggttttcaggccgccgtattcagccatttacgcgccggtcaggcgtggctggatagcgatttacactttctgtccgctaaattcagtaacattcagcgcagtataacgctcggtgcgctaagacgggtggaagagggcgaaaccaacggtcggctgtggggcgcgaggttaaccagcggttatgattttgtcatggtgccgtggttaacgaccggaccgatgctgcaatatgcatgggattacagccacgttaatggttatagcgagaagctcaataccagtacatcaatgcgttttggtgaccaaaacgcccattcgcaggtgggtagcgcgggttggcgtctggatcttcgccacagcatcattcactcctgggcgcagattaattatcgccgtcagtttggcgatgatacgtatgtggcgaacggcggccttaaatcgaccgcgctgacgtttagccgcgacggaaaaacgcaggataaaaactgggttgatatcgcgattggcgcagattttccgctgtcggcaacggtgtccgctttcgccgggctgtcgcaaacggcagggttaagcgatggcaatcaaacccgttataacgttgggtttagcgcccgattttgatgacacgccagggagggccaaccccgttcgttcgtgacacgatgagccgaaagcgcaacggtaagttttataaaaagtaagtattttcaaaaatgtgggtgaagcctgtgacgtcgtttgtaaattatcgtataagcggagtttacgtttttggcggggcgcaggtatgaataaagagtccatatttcgtcagttggagctacggctagccggatgttcactaacagctgacgcgttaggcgcgtttagcgcaatggcgattgccgacagtctcaggcaaaaacgcagcattattagtcaccatcttaataacttgcatcgtgagcagcgggtggtcaaagtgaatagccgcccggtgctgttcctgcccgtcgaggcgctacgtcgtcaccaccggctggcggttcggcagggggattacgcgtccattcaggcgctgtgcgcggagcggcaggacagtctggagctgctcattggcgcacagggcagcttgcaggagtccctgcgtcagtgtaaggcggcgatcagttatcccggcgcgggcttgcctttgctgctgcgcggcccgacggggacaggaaaaagttttttggcgcgtcagctttggcagtacgccatcgagcagggcattttgcccccggaggcgccctttaccgtgtttaactgcgccgaatacgctaataacccggaattgctgacgtcaaaattatttggtcatgccaaaggtgcgtttaccggcgcagacagagcggtatccgggttaattgagaccagtaatggcggcgtattgtttatcgatgaagtgcaccgtcttccgccggaagggcaggaaaaactgttccattttatggataacggcacctggcgtcgcttaggcgaaagcagcgatgaacgcagcgccacggtacgtctgatattcgcctctaccgaagatctggaaaagcactttctggcgacatttattcgccggataccggtcattgtcaaaattctgcctatcgccgaacgcggacagtatgagcggctggcgtttattcaccatttttttcgtcgcgaggcgcagcgtcttcatcacgatttgtcgctggatagtgaaattatcagccaactgatgcaggagaccctggaagggaatgtcggcggcctggaaaatctcattcgtaatatttgcgccagcgcctggactttcggccagcgtgacgatggggtactggaagtaaaagccgggcaactgccggatcgtctgctgatggaggtgccctttaccgttccgcagacggcggaacgcatcatgatttatcgcgaaggtggcgtttttccgcgagtttccggtcagcatcaggaatatttacggttgacggaaaacatttgcggcctgtgcgaagagctggcgcaggagaatatttccgcacggacgtttgacaagctggtctatcaaaaccttacgttatatctcgatgccttaatgaataaagagagccctcgcgctcgtcaggacaagcggctgcgttttatcgaagatgtcgggaaagcgatcgctgcacattacgatctcgaactgaatgcggaattcgcttatctcactggacgttaccttaccagcctgccgttaacgccggtggaggcgtcgccatcggttcgtcatgtgatgctgcgctggctggaggaggcgccggggctggcgcagcgtgtggcgcaaaaactgctggacgtggtaaataataaatatgatttgttaatcgacacgctcgacagactggtcgtggcggccatcgtcagtaatgccattgacgccaccagcggcggtaaggtaaaagcgctgatcatcgcgcatggttattcgaccgccagcagcattgcaggcgtggcgaaccgtctgattggcgaaaagatttatcatgcgatggatatgccgatggaggtcgcgtttagcgatgtcagccgggccattgtcgattatctccagcatacggatacccgcgcaggcgtcatggtgctgatcgatatgggatacaccaaagagatcgccgatgcgcttttgagcgtaattcatggcccgctggtggtggtcgataacgttacgacgcgtctggcgctgaacgtggccagcgagatcgcgctgcaaaaaaacatcgaacagatcgccgaagagatcgtcccgttaaatcagtcgcgctgggatgtcttctggcccgcgcagaaaaaagcgcgcgcgctgctggtgacctgtattaccggcatcgggacggcgtttaaatttaaaaatttgatggaaaaaagtcagttgaccgactttgatattaatattatcgcctgtgaatatactcgcctgaaaaacagccggatggcggcctcgttgctgaatcagtatgaagtgattgcggttgtcggcaccattgacccgcagctggcgggcgttccctgggtggggattgaagagctgcttggcgagcaggggtatgcgcatttaagtcagttattaagcggttatcttaacgataaacaaattgcgttaattaataaaaatatggttcgcgaattttcgttgcataatgtggttaattcgctgaccattctcaatgccaataagacgatagggcatatcgaaacgattattgccgaatggcaaagtacgctgggcttcagctttaataataatttgattattagtttatatgttcatttgagctgtatgattgagcgactggtcatgcgcaatgaaattacccactataaaaacatgacggaatttaacgagcggcatggtgaatttatcgcgatggtaaatcattcatttcagcggttgaaaattctttataacgtggcgctgccggtagcggaaattggctatatccacgatattttcgaattacggatagaggattttcactggtagctgcggtagttcagggaaaaaggggcgctagcgccccgcagaagaaagacctgatggcgctacgcttatcaggcctacagatcgctttgtaggctggataaagcgaagccgccatccggcataactattaatattcaactttccacatataccggcgggtggtcagtgggtgattacgggctgtcgccagagcgaggttataaacgtccagcacacagttgtgcaacagaccgcagaagtattcgccaacgtcggtggacagatcctgaatgccgagtttatccgcatcgatcaactgcagttttccctgatagcgttcaataaagcgaatcgcacgatcgtccagcgggcgagtgcgaccactgctttgcagcaatataaacggcgtgcccggctcggtgatttcgaacggtccgtggaaatactctccgctatgtatgctggcggagttgatccactgcatttccagcagaatacagatagactcctgatgcgcggcgccgaaagaggggccgctgcccatcatatagaccaccttctcatccttccattcggcggcgaaacgctgagcatcttcttgtacctgccgttgggcgccgtgaacaacgtcgctaaagcgcccaaatgcgctgactaactcatcgtattgcgcatagccctctgtttgggcgagaatttccagcgccagccacaggctgtatgcggctttttgttgtgcagggtcgaccgtttccggataacgcgcccactgatattcaatgatgtagtcgctgtattcgcacaacggcgtgtcaggttggtaaaccagaccgatggtcgccgctcctttttcacgcgccacgcgggcggctgcgacggtttccgccgtattgccctgctgcgaggcgagaataacgacgctattttttcctaatgcttttggtgtggcgtggacaaattcattactggtgatataaccgacagccagttttgacgcttcacagtccagaaagtattttcctggccagaagccggttaatgaaccgccgcagccgacaaaccagacgcgttcaatgttttgtttacctaaaatatcgctaataatacggcgggcattttcatgagcaacagacatatttatctccttagcgtgtagcgcgtcctccgcaacagcgcggataataacgagcattaataaaaattaaatttcttgcttacttttcattttttgatggaattgcggatctttgggtatcgccggattaatgcctttttgcgggggtaatatcgcacatagcatttgtagcggaatgatatattcaaagacggcaaagtcctcatcattgacaaacgggaaattcagattcagaccattattttctacctgcgggccgatgcggtaaatagacggcgtccactcaccgagtatttgcgccagccgatcctgacgcgcgtcaggctgcgggtcgagcataatgagtgcggattgcgcattaaaggcattgtaaataccgtgaataaactcctcgaattcgtagcccgacaccggacagcgcaacgtctccagcatcttgagcgcaccctcctgcaccgtaccgaacagcgttgccgggccggtcagacgaatatctgcgctatcgcgcagcgccagcgcattggtttgcgcccacgcctgcgaggcggtaaccagcgcgggcaggtggttaaaggtcttttccatccgcagcagcagtgaccggcgctgttcgccgtccagccgctgttgctgcccggcgacggcgagcgccagcagcatcaaattgagaaccgtgcagtgatagccttttgttttcgcgccagcggtttcttcgccgcagggaacggtaaggatataatccgccgcccggtcgatagtcgcaggcgccacgccagccattgaggcggtgatatgaccaacattgcgggcgcgctccatcgccgccagcgttgagaggctgccgccgccctgggagatgccgacaaccagcgccttgccgctgcgggcaagcgtctcgtcgtcaagcataaacggccagcagacatccactggtaatgcgcaccagcgctgcataaacgtgcgagcggtcagcgcgccgtggtatgacgtgccggagcctgtcagaataatgcgggtgacgccgcgttccgttagcgcctgcgccgcgcgccagagatcttcccgcgtctgcgtcagcatctccagcaggcgaaggggcgtctcgttcatatagtcttctacttgcatagtgttacctctcgtcaaagcaggcccagcgcgctggcaagaagcccaaacacgacggtgcctaacaggatccagttaatgttcacgcccttacggataagtttgtacatgccgagcgtgaagagcagcggcagcagggaagggaggattttgtcaataaaatcctgcactttcatggtagtctgcccggcggtaaagctcagcggggttgtaatgtcgatcatgctggcggtcatggcgccgacgaccatcaacccgacgattgacgcgatataagtcaccctgtccatcagcccgctttgccagaggcgcatcagccaggtggtccccgcccggtagcccagtttgagggcgtaccagcggcagaggatgtgcggaatgttatagaccagtagggcgagaatcggccccagaatgctgccctgctgggcaaagtagatccccatcccggcggcgataactttcagcgatccccagaagatggaatcgccgatcccggccagcggccccatcaggctggttttaacggcattgatcgactcttcgttaaagtccgggttgcgttgattttcctcctccatcgcaatcgacaggccaaagacaaacgttgacagatgcggcgtggtattgaacagcaccagatgacgctgtaaggcgcgccccagttcggcggggtcctggtagatacgctttagcgctggcgacatagcgaaggcatagcccatatgctgctggcgttcatagttccacgatccttgcaacgtaaaggagcgccagaaaacgctgcgtaaatcgcgggcggtgatgcggctttcgctttgcgagtgagcctgtgcgtcgtcgatcagggtctgcgtcacttcactcatgattagccctcctgttgggatgtgttaagaaactggctgataatgaaagccagcaccacggcaaacagcgcgatggcgatgatgtccagtttggtatatgcggcgatcagaaagcccagcccaaggtaaggcattaatttgctgctaagcatcatgctgatcagcaacgcgaaacccagcgccggcaaaatcttactggcgacaaccaggccattggtaataaaggcgggaatggcgtcgaggaaccaggtgacggcggcagaaccgagcaaaatggcgaaaaagaccggcagaaaaccgcttagaaaatagagcagcgttgggcctcccaggtgcataacggcaaccatccgggtattaccctgcgccgcataacgatcggccatgtggccaaagcgggcgttaaccacgcgcaccaggacgccgagggtctgcgccagcatagagataggaatcgcgatggtcagcgccgcttcgggcccgcgcccggacataatagaaaacgcggtcgccagcaccgaaccggtgacgacatcaggcggtaccgcggcgccgatagcgacattacctaaaaagatcagttccagcgtcgcgccgatcagaatgccttcgtgtaaattgccgcagaccagaccggtgagggcgcacatcaccagcggacggtcaatcatcgacacgccgagtaaacgcccgtcaagaatgcccagtgcggcaatcaggccgagcagcgttgcggtgagcaacatagtgacctccgggttcagagtttatcgttaagcaattcggcggaatgagccggaacctggcgcatttccagacggatgcctttggcttttagcgcctggctatcggcaatctcctgctcggtcaggtatatggctttgccgaactgctgcgcgccctctttttgcgcgataccgccgtagttgataacgctaatccctggcactttctcgacgaaggcgagggtttcggcggtatttcccagcaccaccatcacttttttgtgatccagcttgccgctggcgagtttttccgccgcctgttccaccgtgataatgtccagcgacacgccagcgggttttgccagacttaatgacatagagacaaacgcgtcgccggcggcgttggcgttagcgacgatgatatggtcgatatccagcgcccgggtccaggcgaagaccacctggccgtgcagcaggcggtaatcaatgcgcactaatttgatcatgggattctccctgtaggtcagcggatggttgtgttattagcgtgttgataaagacaatggattcacgcgccgcattggtggcgtaggtaatggccgcgtctgtgctttcttcttcacagagtaaaaactccagcaacagggtcatgttgacgccagccaccacaaaaacgtgacggtgacgcatcagcactttcgcggcgctattgttgatgctgccgccgagcagatcggtaaacaccaccacttcttcgccgttggcttgcgcgatcagattttcgagggtttgttcaagctgctccgtggtgacaatatcgccatcgtaggcgcaaaccggtgtcacgccgtgttcgtcgccaatcagcagcgatagactgttaataagtccgcgggcaaaagggccatggctggctacataaacatgtctcacccgttttctccttcatccagatagggggtatccagatatggcaaacggcgtgccagttttaaatgttatttattttcaataaattgaaagaggaagttaacactagcgatgtaaaacctggcacttcgcgccattgatcattgaggaacctggcagaaaggtgaaaaaagccggacgggcgtccggcttaggcaggggattaaacttccgtcagtgtggtttcaagcggcagacgtgatttcggcagcccggcgttgaaatcctcgacgctatgatggccgaccggcaccacgaccagactggtatagcctttttctttcagaccaaattcagcgtcgagcacctcggcgtcgaaaccttcaatggggacggcgtcgagacccatcgcggcgacgcccagcagaaagttgccgacgttcagataaacctgcttcgccatccactggtggtcatctttcagcgagacgcggtgcatatcggcgaaaaagcggcgacctttatcatttgccgctttagcttccggcgtagcgaaacggccatcagcatcttcctgatcgacgacgcgctcaagccatgcgtcatccattgcggttttggcgcagaagaccaccacatgggaggcgtccagcattttgcgttcgttgaacgtgtagtttccggcagcggattttgctacgcgcgctttgccttcttccgtactggcgacaataaagtgccacggctgggaattggtgctggaggggctgtactgtagtagtgtttttattttatccgcttcttcggcggtcagttttttgctgggatcgaacgccttagtggagtagcgctgtaaggcgacagaaacgatatccataaatgctcctggttggtttagtacccttttgtatcagcagggtaccgggttatcggtaaaaagataagggaggaaaatgcggaaacggttattgcatcagcgcggccgcaggcgcagttgctctcttttaggcagcccgtctacgaccagattccatgagtcatttatcaaatcgttgagtagcgagacggtgatatcctcgcccgcatagactgaaatccagtgtttcttattcatgtgatagccaggcgcaatgctggggtaaatttgttgatttaccagggacttttggggatccgacttcaggttcaccactgggcgacagtgatgttcagtgaacagcatgaatattttgccgccgactttaaacacatcgtactgtgggccgaaaggccagcagtgttcggtaaaaggcagttccagcgcaaagcgttttgcccaggcgtgcagtgtttgaccgtccattattgctcctcgcgagtcagcgcgcgccacatggcttcgaatcccagcgcaatatattcgccagcgcgagcgggatcgcgcgcggcgaaatccattgttgtttcagccagcgccagaaaaaggccgtcgccgaaggcgcggtattcatccgacataaacaccatcaaaacggaacgatgacataaatcgcgcaattcggggaacatatcgtcggcccgttgttccgtctctttggtgagcttttcgctgacggccagttgacggatcgcccgatggcgcgcgggatggttcagaccccaactgatgtaactgttccagataaaacgagtcatcattttggcatcggtaatggatcgatccagctccattatcattgactggcagagatcctgctttaaatgcaaatacaacgtgttaatcagctcatctttggtcgcgaaatagcgaaacaatgttccttctgcaacacctgcgttacgcgcaatcaccgccgttgaggcggcgataccggattgcgctatcgcctgggttgccgcttccagtaatgcttgttttttgtcttcactcttcggacgagccactacacgttacccttatgtctggaaaaacatgattgaatcatgcccgttgtcgcgtcgcaacggtgaatgtcaacctttgaaaagtaccttgacggcgtatctttgctttctataatgagtgcttactcactcataatcaagggctgccgcatgaagtggtagaaaagcatattgcaggccatgcgataagctgtctcacaatttgtgtggttattactatgcttattgctgttgccgtaaatgtgcggtgcgggagccgctgacgagtttgatagaggggagagcacgatgaccatttccgctcaggttatcgacacgattgtcgagtggattgatgataatttgaatcagccgttacgtattgatgatattgcccgtcatgcggggtattccaagtggcacctgcagcgcctttttatgcagtacaaaggggagagtctgggacgctacgtgcgtgaacggaagctaaaactggcggcgcgcgacctgctcgacaccgaccagaaggtgtatgatatttgtctcaagtatggttttgattcgcagcaaacctttacgcgcatttttacccgcacgttcaacctgccgccaggcgcttatcgtaaagaaaagcatggccgtacgcattgaaatgtttaatcggccagcgaaaaccagcgccgccagataaagcgaatgacataatattccagcgcgccgagcaacagaaaccataaacaaaacaacaaagtataaagctggttgagatccataagatgaaagatcccgaccagtttttgcgccagcgcaaggccgagcgaaggggcgggcagcagcaggctggagagcaacgccatcagcaaaataccggcagcggtcatcaatgattcaagcgggtgtttcatggctttgttaaacgtaagttaaaacgccattgtccgggatatcgcctggtaaggcaaatatgctgtctattgtcccgcccagatttcacaatgtttttgtaccagacctatcagcgatccgccgtcggcaataaactcccgcatatattgcgcttcgttaccgccttttttcacctgcagacgtagcgcgtcaatggcgctgtcggcgcccagcttgcgcgcagagggggtaacgttgtccagcagacgcagcgtatcatctgccaggcgacggcggtcgccggtataggcatcggttagcacgccctccagaccatagcggcaagcctgaaaacggttgaatttatataacagatagtcttgttcctgcggtttaaagggacgctcggtcagcagccagtgcgcggtcgcctgaatcaaccctgccatattgatggcatgatcaagagtgagcggcgtatccatcacccgaacttctaccgtgccaaaggccgggctggggcggatatcccagtgcaaatctttgatgctgtcgatcatcgtggtgtaagacagacgacgaaatagtccggcaaactcttgccagttactgacccacggcatgggcccgttatcgggaaaagcggaaaaaatattcaggcgcgcgcaggcaaaacgggtgtcagctccttgcatatagggggacgcggcggagagcgcaataaagtgcggcacaaaatgcgacagcccgtgtaaaagataaatcgcatcgtcgccgttcgcgcagccgacgtggacatgctggccgaaaaccgtcgcctgttgaattaagtagccgaaattttccagcgtgcgttgatagcgctcattatcacagacctcctgacgctgccatttttgaaaagggtgcgtaccgccgccgcaaatgccgagatggtgttccgacgccgcctgtaaaataacgtgctgcatagcagaaagttgggccgccgcctggtcaatatcgcggcagacgcccgtggccatctccagcatactttcggtgatatcgtgcttaatttctcccgcagtaagttggggcttaacggcgtcgatcagcgtagaagagtcctgacttaaatcgtagccaggtggattgatcacctgcatctccagctcaataccaagcgtataaggttcagaaacgtgaaaatcattcagcgccatagggatctcatttatcggggtattgcgctaagtatagaagcgggagcgctcctgtcgtggggaacgcgcgttattgcagaaacaagagtaataacgctattgtcacgttgaaaccattctgtacggacggtacgttcagccatcgtggcggcaaaggctggcagcagatgtaacgagatgtgcgtggcggtaagcgaggtaacttttgcgctattgaatcccgggagcgtgacgcggtctgaaaaggctttataaacgctctctttggcggagaaagccagcgtcagggcaagcggaaaagggagcaagctcgcctggagaatttggcgctcatcgctatcaataatggacggcgccagctctgtcgccgtgtgctgactcatgattttttctatatcaatgccgatacgctgtcgggatatgacggccagcgccgttgtcgcacagtggctgatgctgccaaataggccgtccggccatagcggctgtcgcttgtcgcccataccgggcactgtcctgacgcccacctcgcgtagcgcatgaacggcggcaatgcggcctgccagatgttcagctttacgcttgcgtccggcagaccggagccgatcgtgatgaggtagccatagcaggtcgtgttcgcgaaagctgctcgcatcaaagtcgacgatatgcagcctgtgtccggcaaagggaaggggaaaatgagatgtcagcatcgtttttgccaattccctccccgaatgagggagggaaggttgccatcagaaatgggtattaatgctcatataccacgtacgtcctggttcgttataggtgtacgcgccagcgcccgccatataagcgccagtttgcgtatccctgacggtttgcgcgttaccttcacgccacagacgtttgtcaaagaggttatccacgccaccggtcaggctgacatttttggtcacgtcccaggtcgcgctcaggccaacaatactgtatgggctgaccgcttgcttatctgttccggtaacggggttaccctgataatcatatttcttcggctcttgtttgccgtaccaggtgaaggtcgattgcagagaaacgtcctgacgtacctgccagctcagggttgagttaagcgtgtactgtggaataatcgacaggcgttcgccggtctctttgtttttactctgcagcatatacgtaacgttattcgtccagttgacggtgtcgctaaccggtacgtttaacgtgccttccagaccttcaacgaccgctttcggcacgttctcccactgataaacatccgttttgccgttgttgatacgctgcaacggcactgtacccgcttcaatcttattgcggtaatcattgcggaaccaggtgacgccggccagccagccatcgcgtttaaattccagaccgatctctttattgatgctagtttcggctttcagatcatcgttacccatcatatagcagccgatgccggtacccgcgccagtcgcgtagcaaccctgacctttactgtacaaaatatagtttgggttagtctggtacagactcggggctttataagcgcgggcgattcccattttcagggtaaagtcatcccccagaccttgcgacaggttgagggacgggctccagttatcccccacaatactgtgatgatcgaaacgtagccccggcgtcagcatggtgctgtcggtcagttccatgttgttttcagcaaacagagagaaaatttccgcttttgaataggggctacgattggtactgctgtaacccgggatatttccccccataaaggtttgcgagttggagagctggtctttcatacgctgttgggcccattcagtacccagcgtcaggttttgattgaccagcagatcgaaaggaaggctcacttcgctgtgtagggtgacgtcattcaaatcggcatcggcatatttttgcgatgctttgggatcgaaaattccttcggtgccgcctgccaggccttccggcatccgggagttacgggtatgttcgtattgcacccagttactggtggttacgccattattccagccgccgttccaggtcagagagtagttctgccgatagaggcggttcgtctcttttccgtaattatctttcaccagttggttcgtattggtgttctgagtatcgccggcatagagattgccctggcgactgtatccggcctccagctccagagactgaagcggagcaaaatcccaacgaaccacgccgttgatatctttgttaatgaccccctcgcgtcctgctggtagcgtgtcggcgtaactcccggtacgttcagactgatgcccctggttaatattacgcgcatccgcctgcgttttgtcgaggttgccatacaggcggaagctgaaatccccgcccagcgggccgttcaggctaaagttagtgcgtttggtcgcgccttcgtctttatgttccggcgcgttgaaataggtattccaggaaccgtgccactcgctaccgccttttttggtaatgatattgactacgccacccgccgcgccgttaccgtagcgtgcggcggcagggccacgcagcacttcaatgcgttcgatcatctccggcggcacccacgcggtatcgccgcgggtatcgcgttcgccgcgccagcccaggcgcaccgagttacggctggtgacgggtttaccgtctatcaggatgagggtgttttccggccccatgccgcgaatatcgatttggcggttattcccgcgctgaccgctggtggagttgccggtcaggtttacgcccggcatggtgcggatgatttctgacacgtcgcgcgcgggcggatttttgcggatctcatcggcggtgatggtggatacgcctggcgcctgtaggttttgctgggcagcggtcaccacgatggtgtcttcattggtgagcgcagcgctatcggttttgtcttccgccatcacgggcagagcggccccgtaaatccctaaattgaccagtaaggtcagggaatgaatcttcttgttcattgtatatcctgcttttctttagccacataagccaaagcgcccgtcaaaggcattggccgggtggtgaaattgtgttcgcgcgtcccatagcgcgacaatacgctattgcaaatgcaaatagttatcaataatattatcaatatatttcaccttttatatacaaaattcataataaacacagggttataatgaaagaggcgctggcaacgggaagtgaggcctggtggaggacgaaaaccgggccggaatggatacgggaaaaagacggaaattatcgggtcactttttggtggcgcgacccgcagggaaacgaaacacactccccgatacggcgtgtctgggtctacatcactggcgtaaccgatcatcatcaaaacgcgcagcctcagacgatggcgcgtattgccggaacggatgtctggcgctggagcacggcgcttagcgctaactggcgcggcagctactgttttattcctaccgagcgcgatgacgtttttgccgcttttgcgccgggcgaaacgcccgatcggaacgtgctgcgtgaaggctggcgacagctattaccgcaggcgattgccgacccgcttaattcgcaaagctggcggggaggacgtggtcatgcggtttcagcgctggaaatgccggatgcgccccttcagccgggatgggatcgtcctgaaacgccgtactcgccgcctttgatgatgcagtggcatagcgaacgtctgggtaactcccgccgcgtatggatattgacgaccggagacgaggcgccggaggaaagaccgttggctattctgctggacggtcaattctgggcggaaaatatgcccgtctggcccgcgctcgcctcgctgactcatcaacgcctgcttcccggtgccgtctatctgctgattgacgcgattgatactcaacaccgcagccaggagttgccctgcaatgccgacttctggctggcggtgcagcaggaactgttgccgcaagtcagagccgtgacgccttttagcgatgatgccggacgaacggtggtcgccggacagagctttggcggcctgtcggcgctgtatgccggcctgaactggccgacgcgttttggctgtgtactgagccagtcaggatcgttctggtggccccatcgcatcaccccgccggagggggaagtcattacccggctgaaaaccggcgcattatgcgcgcgcggactgcgtatcgtactggaagccggcgtgcgtgagccgatcgtgtttcaggcgaatcaggcgctttatgcccaactgaatacttcgcagcagtccattttctggcgtcaggttgacggcggacacgatgcgctttgctggcgcggcgggctaacgcaagggctgatgctgctttggcagccgcttatcgacacgctttaaccgggcacatgtccatgacaggagttgagtatggaattcagtaatcccttcgataatccgcagggacagttttacatcctgcaaaatgcgcagcgtcaattcagcctttggccagcggcatgtgcgcttcccgcaggctgggacgtggtatgcgaaccgcaatcgcaggacgcgtgccagcagtggcttaatacgcgctggacaacactgaatccggcgcattatgccgataagcaggaggcgaaatgacgcagcgtttaccgttagtcgccgcccagccggggatctggatggcggaaaaactctctgatttaccctccgcctggagcgtggcgcactatgtggaactgaacggcgagctggatgccgccttgctggcaaaagcggtagcggtagggatgcaacaggcggatacgctacggatgcgttttaccgaagagaacggcgaggtctggcaatggatagatcctgagcacaccttcggcgagcccccgattgccgatttacgcgaccagcccgatccgcatcacgcggcgctggcgttaatgcaggcggatttacggcaaaacctgcgcgcagatagcggtaagccgctggcgtttcaccagttaatccgcattgatgatacccgctggtattggtatcagcgctatcaccatttgctggtggatggctttagcttcccggcgataactcgccagattgcggcgatttatcgcgcctggcagagcgacgctcctacgccggagtcgccttttaccccctttgcggatgtggtcgaggaatatcagcgctatcgccagagcgaggcctggcagcgtgacggcgccttctgggcgcagcagcgccgcgagctgccgccgccggcgtcaatgtctgccgcgccgttgccggggcggtcggcgagcgcggatattctgcgtatgaaattgagcgcgccggcgggggcgtttcgccaactggcggcgcacatgcctgagataccgcgagcggatcttgccctggcgctggtgacgttgtggctggggcgattatgcgggcgaatggattatgccgccggatttatctttatgcggcggatgggctcggcggcgttaacggcgaccgggcctgtccttaacgtgttgccgctggcggttaaccttcatgcaacggaagatctgccaacgctggcgaagcgtcttgcggcgcagttaaagaagatgcgccgccaccagcgttacgacgccgaacagattgtacgcgatagcgggcgagccgcaggggagacgccgctatttggcccggtgctcaacataaaagtgtttgattatcatctggatcttcctggcatacaggcgcaaacccataccctggcgacggggccggttaacgatcttgaactggcgctttttccggatgaaaacggcggtctggatattgaattgctggcgaatgcacagcgttacgatgatgccacgctctcccgccatgccttacgattgatggcgcttatcacgcagtttgcggataacccggcgctgcgctgcggcgatgcgcaaatgctgctggcggaagaacaaacgcaattagcacaccttaataatacggcggtaacgattcccgccgccacgcttagcgatttggtggcgcagcaggcgcaaaaaacgccagaggcttccgcgttggcagatgcgcattatcactttacctaccgtgaaatgcgcgaacaggttgtggcgctggcgtacgcgctgcgggaacgcggcgttcagcctggcgatagcgtggcggtggcgttgccgcggtcggttttcctgaccttagcgctgcatggcattgtcgaggcgggcgccgcctggctgccgctggataccggttatcctgacgatcggctgcgaatgatgctggaagatgcgcagccgaaactgttaattacgactcaggcgcagctggcgcgctttcacgatattccggggatggaatatttgtgttatagccaaccgctaccggtcagtgacgccactccgctgaggctgtcgttaccgcatcataccgcttacatcattttcacctctggctcgacgggcaggccgaaaggggtgatggtgggacaaacggcgatagtcaaccggctgctgtggatgcaggatcactatccgttgacggcggatgatgtagtagcgcaaaaaacgccgtgcagttttgacgtctcagtatgggagtttttctggccgtttatcgccggggcgaaactggtgatggctgaaccggaagcgcaccgcgacccgctcgcgatgcagcggttctttgcgcaatacggcgtcacgaccactcattttgtgccgtcgatgctggcggcctttattgcctcgctcacgccagcgtcggctgggaaaagctgcgcttccttaaagcgcgttttctgtagcggcgaggccctgccgacggcgctgtgccgcgaatgggagacgttaaccaacgcgccgctacacaatctgtacgggccaacggaggccgcggtggatgtgagctggtatccggcctgtggcgatgagctggcggctgttgacggcaacagcatcccgattggttatcccgtctggaataccggtttacgtattctcgatgcgcatatgcagccggtgccgccgggcgtggctggcgatctctatcttaccggtatccaactggcgcagggctatctggggcgtccggatcttaccgccagccgttttatcgccgatccttttgcgccaggcgaacggatgtaccgtaccggagatgtggcgcgctggctggattccggcgcggtggaatacctggggcgcagcgacgatcagctcaaaattcggggtcaacgtattgaactgggcgagattgaccgcgtcatgcaaacgctgccggatgttgaacaggcggtagcacatgcctgcgtctttaatcaggcggcggcgacgggtggggatgcccggcaactggtcggctatctggtgtcgcactccggtttgccgctggatttaccggcgctgcaggaaaaattacgccaaaaacttcccgcgcatatggtgccggttgtgctgttgcaacttgccagcttgccgcttagcgctaatggcaagctggatcgcaaagccctgccgctgccggacctggcgccgcgcgtgaaagggcgcgcgccgcagtccgcaacggagattgctgtcgccgcggcgttttcccgcctgctgggctgtgagattaacgacgttgaaagtgatttctttgcgctgggcggacactcgctgctggcgatgaaactggccgcgcagctaagccagacgtttaaccgccaggtgacgccggggcaggtgatggtggcgtctgacgtggcgcagttgagtaagctgctcgatactgacgatgacgaacgctcgcgcaatctggggttcgggccgctgttgccgctgcgtgaaagcgatggtccaacgttattttgtttccatccggcgtcggggttcgcctggcaatttagcgtattatcacgctatctcagcccgtcgtggtcgattatggggattcagtcgccgcgccccgctggccctatgcaaaccgcaaccacccttgatgaggtatgtgaacatcatctggcgactttgctcgcccggcagccgcatggcccttattatttattaggctattcgctgggcgggacgctggcgcaagggatcgccgcccggttgcgcgcgcgcggcgaaaccgtggcgtttttggggttactggacacctggccgccggaaacgcaaaactggcgggaaaaagaggcgaatggcctcaatccggacgtattggcggaaattgaacgtgaacgcgctgcgtttgtcgccgcgcagcagggaaatgcctccgacgccttatttaccgccattgaaggcaattatgcggatgccgtccgtttgctgacgacggcgcatagcgtaccgtttgatggacatgctacgctctttgtggcggataaaacggtgccggaaggcgtatcgcctgaacagagctggtcgccgtggatagcgtctttggctatttatcgccagccgtgcgcgcatgtagatattatttctccctccgcttttgaaactatcgggcccatcatcagcgaacttattaataaataacgggcgttgtttctgcctttaacaaattaaatcctgaaacccataataattactaattattatgggttttttattgcaactattaattcttttaacataagtgatacatgctacaggcaagtttaattccgaatatttagcttttcgggcactggcgcgtaaagattgtttcggataattctgacttgctgttagaatctctgacaggaatgtgttctttcattggataaatttttcaggtcatacggcatgccatctcttaatgtaaaacaagaaaaaaatcagtcatttgcaggttattcactgccgcccgccaacagtcatgaaatcgatttgtttagccttatagaggtgttatggcaggcgaaacgtcgtattcttgctaccgttttcgcctttgcgtgcgtggggttgcttctgtcctttctgctgccgcaaaaatggaccagccaggcgattgtcacaccggcggagtcggtacagtggcaggggctggagagaacgttgaccgcgctgcgcgtgttggatatggaggtaagcgttgatcggggcagcgtatttaatctgtttattaaaaagtttagctcgccctcgctgctggaagaatatcttcgttcttctccgtatgtcatggatcaattaaaaggcgcgcaaatagacgagcaggatcttcaccgggcgattgtcctgctgagcgaaaaaatgaaagcggtggacagtaatgtcggcaagaaaaatgaaacgtcgttattcacgtcgtggacattgagttttaccgcgccgacgcgggaagaagcgcaaaaagtgctggctggctatattcagtacatctccgatatcgtcgtgaaagagacgctggaaaatattcgtaaccagctggaaatcaaaacccgctatgagcaggaaaagctggcgatggatcgggtgcgtctcaaaaatcagcttgatgccaatattcaacgtcttcattattcgctggaaatcgccaacgccgccggtattaagagaccggtttacagcaatggtcaggcggtaaaagatgatccggatttttctatttctctcggcgcggatggtatttcccgcaaactggaaattgaaaaaggggtaacggacgtggccgagatcgacggtgatttgcgtaaccgtcaataccatgttgaacaactggcggcaatgaatgtgagtgacgtgaagtttaccccgtttaaatatcaactgtcgccgtctctgccagtgaaaaaagatggcccgggtaaagccatcattattatcctggcggcgttgattggcggtatgatggcctgcggcggcgtattactgcatcacgcgatggtctcgcgtaaaatggaaaacgcgctggcgatagatgaacggttagtctgatttacccgaaaagccggatagcgatatccggctttgtcatcagtgtgggcgactatcgccgccccagcggtaccaccagcggcgtcccggcaaccggatcgtcgataatcatacagcgcagcccatagattttttcgataagctctgcggtaacaatctctttcggcgcgccctgtgcgacaatattaccttcgcgtaatgcaatcaaatgcgtggcgtatcggcaggcctgattcaggtcatgcaggacggcggcgagcgtatagcctttttcgcggttgagatcgcttaacaactccagcaaatcaatttgatggctaatatccagccacgttgtcggctcatccagcagcatgatggacgtttcctgcgccagcaccatggctatccacgcccgctgacgttggccgccggacagagtgtctacactttgcgccgccagtgaggtgatacctgttgcacgcatggcactggcgacggcatcggcatcttccttacgccagcgggtaaataacggctgatgcggataccgccctctggcgaccagctcttgtacggtgatatcgcccggcgtggtagcgttttgcgccagcaatccgatgcgccgcgccacctctttactggcgtaacgctgtatttgttcgccatccagccagacatggccgtcaacaggcgtcatcagacggcttagcgtacgtagcaacgtcgacttgccgcagccgttagggccgatgatggcggtaaaatggccgtccggaatcgaaacattaaggttttttgcgacggtatagctgccataacccagcgttaactggtcgccgcgcaaacgggctacggattcggtcattttttgcgggactcctgaattaacaagacgataaggtaaataccgccgaggctgacggtgaccacgcccactggaagctgataaggcataaacagttgctgcgcgcacgcatcggcggccagtagtaataacgcgccgcacagcgccgactgggttaatccccagcgcgctgtgccgctaagacggcgggcgatgtgcggcgcgacaagggcaataaacgagatggggccagccagtgccgttgccgcagcggtgagcgacaccgccaccagcatcagcatcaggcgtgaccgctccacgctaacacccagcgcgcaggcgctgtcatcgcccatctccagcagccgcatacgacgcaccagtagcgcggcgcctgtcagcatcaccataatcagcggcgccgaaggccaggtttttgcccatgtcagaccgttgagcgacccggcgttccataagccagcggtgagcgccgtttccagcgacgcctgcaacagaagccaggtattaaaggcgactaacatcgcgcggatgccgataccgatgataatcagccggaaagtttcaatcccgttacgccaggcgagcagccagacaatcaatgacgtgacgataccgcccgccattgccgccagcgcgatcgcggtaagatgctggccaaacaggaccattgcgaccagtacgccgctccaggcgccggtattaaagcccatcacatcagggctgcctagcgggttacgcatcaacgactgaaaaatcgcgccactgacgccaagcgcagcgccaatcagtagcgccattaatacgcgcggtagtcgccattcggttacgacaagggtgatgttacgcggcgcgtcgcccagcagcgcggcaataatctgcccggtctcaaggggcacggcaccgctttgcaggctccataagccaatggcgaagcagccagccgccagaagcaggcagcttacgataagccgacgagaaagaaacatcacaggccgcctccgctcgatttacggcgtaccagaaagataagtaccggcgcgccgataaacgcactgacgaccgatacgcggagttcgcccggcactaacagacgaccaataatatcggcaaaaagcagcagagcaggggttgccagtagtgttaccggcagcgaccaacggtggtctgcgcccaccagccaacgcgccatatgcggcatcatcagaccaataaaggcgatagggccgaccagcgccgttgcgctgccgcacaagacggtaatcgccagtaaaccgataagttgggtgcgcgccactttactccccagcgccgtcgcagtatcgctgccgaggctcaggctattcagcgcacggctcagaaatagcgccacgatcccagcgataaccacgggcgcaagcgcgactttcaacgtttgcaggctacgaatgtccagcgatcccgcctgccagaagcgaagctgatcataaacctctggatttaacagcgcgatgccgctggtcaatccttccagtaccgcgccaagcgccacgcccgccagtgtcaggcggaccgggcttaactggccgccgccctgactaccggtgaaggcgacaatcagtgatgcgataagcgcgccgctaaatgccatgaaaagctgttccagcggcgtggagaaaccaaacagcgccgcgcccagtacaatggcgaagctggcgccgttgttaacgcccagaatccccgggtcggcgagcgggttgcgagtgagtgtttgcatgagcgccccggcgaggcccaacgcgccgcctgccagtaatccggccagcgtacgcggcaaacgcgcatccaggacgatggtgcaatcggcgctttggcacacgccggtgaacgcctccagcacgacggcggcgggcagcggtttcgcgccaatgaccaggcttaaaaccgcggcgagactcagtaataacaacaatccgggcacggcaaacgcgcgcgtcacggaaaacgagcatgacatagtaacttccctgataatgatagtaattatcgttatctatcttatttggttatgttagcatgtgcagccattgaatggatatttaaaaaaactcgcattaaggcgttgtaatgaatcgacaatcctggctgctcaatctcagcctgttgaagacgcaccctgcatttcgcgcagtatttctggcccgttttatctctattgtctcgctggggctgcttggcgtggcggttccggtacagatccaaatgatgacgcactccacctggcaggtagggctgtcggtaacgttaaccggcggcgccatgtttattggcttaatggtgggcggtgtgctggccgatcgctacgaacgtaaaaaggtgattctgctggcgcgcggtacttgcggtattggctttattggcctgtgcgtgaacgcgctgctgccggaaccgtcattgctggcgatatatctccttggcctgtgggacggctttttcgcgtctctgggcgtgaccgcgttactggcggcgacgccagcgctggtcggaagagaaaatctgatgcaggccggcgcgattaccatgctgacggtacgtctgggatcggttatttccccgatgttggggggcatattgcttgccagcggcggcgtagcctggaactatgggctggcggccgccgggacgtttattacgctattgccgttactgacgctgccgcgactgcctgttcctccgcagccgcgggaaaatccatttatcgcgttactggcggcatttcgttttttgctcgccagtccgcttatcggcggtattgcgctgcttggcggcctggtgacgatggcaagcgcggtacgcgtcctctatccggcgctggcgatgagctggcaaatgtcggcggcgcaaattggtttgctgtatgcggcaattccgctgggggcggccattggcgcgctgaccagcggacaactggcgcatagcgttcgtccggggctcattatgctggtttcgacagtcggttcttttctggcggtggggctgttcgccatcatgccggtctggatcgctggtgttatctgtctggcgctatttggctggcttagcgccatcagttcgttattacaatacactctgctgcaaacccagacgccggaaaatatgctggggcgaatgaacggcctgtggaccgcgcaaaacgtcacgggagacgctatcggcgcggcgctgttaggcggtcttggcgcaatgatgacgccggtcgcttccgcgagcgtgagtggattcgggctggtgattatcggtttgttgctgctgttagtgctgggcgagctacgtcgttttcgccagacgccgccggttagcgatgctggctgatgaaggggcgtttatccgactgaccaaatcggtctggtcagtcggataagactccgataaggctaaaacagggcggcaagccggttaagcaacaatgttgcgctgtaataatccagacggaacgtctccgtacccagggcatagacgcgcttattttgcaccgctggcaggtgcgccagcagcggattggcgtaaagggccgcgacatctttgttgtcgccggcaaacaggaaaagagattcgccgtttaacccggcggccagattttcaccgccaagctgaatgatatcgtggcgcttaccctggcttttgctggtttgcagccctcggggcaatgtcgccagcgtaaagcctaactgtgtcaatagcttgccttgtgctgattctggcgtccacagattggcgctatgcgcggcaggggtatacaccagcgcgctaaccggctgcggcggcagggcgattcgctgtttaaccgtcgtcagttgcgtctcaaactccgctattcgcgcggcggcctgtttctcctgaccggtgatctcgccaagttgcgtgagcaaactctgccagcttttatcgtcataattgatgacgagcgtcggcgcgatagcggagagctgatcgtaaagcgccagcgcggagtcgccgccggtggcgctaatcaaaatgagatccggcatttgcgcggcgaccgtttcggcattcggttcgccgatgtacagccgggcgacatggcgagcctttgctacgtcgctccactggcgcataaacccttgatcgtcggcaaagcggttattcggcgtagtggctccgctggcgacgacgggcgcatcaatcgccagcagcgagcctgtcaacgtcacgctggtagagacgatacgcgcgggtttgtggtccagagtatgaacgccgcggctgtcctggatttgccggggccaaccggcgtcctgggctaaggatattcctgaaattgatataccaaccactaaaagcagccaacgataaaaggcggggagtctcacaatagcgtcctgttattaataaagttaatgcttctcattttcatgtcagcggcagcgagatgcaagccttagtgccatttaactcatgaccagagttgacagagcgacgttttactcttaggttagcgcactaaaaatagaaataataatcattattatacacaaaatcattcaagaagcatcgcaacggcaagggaagaaatccccgcgggcatagataactgtgtgaccggggtttctgatcgcagccaacaaagaggcagcttgaaagatgaagtgtatataagcctttatcattggaggatgatatggatatgtcactggccgaggacgctcaggagacaatggcaacgcttgctcccgatcgctttttcttcatgtcgccgtatcgcagttttaccacttccgggtgcttcgcccgttataccgagcctgcggttgccggagattcgccggatagccctttccagcagaaattgcgccagcagtttgccgaggccaaatcgcagggcatcgccaaccctatcctggtgggggcgatcccctttgatactcgtcagccgtcgtcgctatttatcccgatggcgtggcagtccttttcccgccagcaaaagcagcgcacggcgcgttattttactgaccatcagtcgctgacggtgacggcgcgaaaggcgattccggagcaggatgcttttgaagcgatggtcgcacgcgcggctatgctgaccgccacgccagacgtcgataaagtggtgctttcccggctgatagatatcaccactgatgtggcggtggatagcggagcattgctggagcggctggttgcgcagaatccagttagttacaacttccatgtgccactggcggatggcggcgttctgctgggcgccagccccgaattgctgctacgcaaagagggcgagcggtttagttcgctgccgttagcaggctcggcacgtcgacagccggatgacgttctggatcgcgaggcgggaaaccgactgctggcttcacaaaaagatcggcatgaacatgagctggtgacgcaggcgatgaagcagatcctgcgcgatcgcagcacggaactgcaattaccttcctctccgcagttgatcaccacgccgacgctatggcatctcggtacgccgtttgagggcaaggccaacgccggagaaaacgcgctgacgctggcctgtctgctgcatccaacgcctgcgttaagcggtttccctcatcaggtcgcgaaaaagctgattgctgaactggaaccgttcgatcgtgaactgtttggcggcattgtcggctggtgcgatgccgaaggaaacggcgagtgggtagtgacgattcgttgtgcgaaattgcacggtaatcaggtgcgcctgttcgctggcgccgggattgtccctgcctcttcgccagtcggcgagtggcgggaaaccggcgtcaagctctctacgatgttgaacgtttttggactgcattaaggaacgatgatgcgtatacctttcacccgttggccggatgaatttgcccgccgttatcgtgaaaaaggctactggcaagacgtgccgttgaccgatattctgacccgccacgctgacagcgacaagacggcggtcattgaaggcgagcgcgcattcagctatcgccagctcaaccaggccgcagataatctggcctgcagtttacgccgtcagggcatcaaacctggcgaaaccgctctggtacaactggggaatgtaccggaactgtatatcacctttttcgccctgttgaagcttggcgtagcgcccgttctggcgctgtttagccatcaacgtaccgaacttaacgcctatgcgatgcagatcgcgccgacgctggtgattgccgatcgccaacatacgctgttcgccggggaggactttctcaacacgtttgtggctgaacaccgctctgtgcgggtggtgttattgcgcaacgacgacggcgatcacagcctggacgcggcgatgcggcaggcggcggaagatttcactgccacgccatcacctgctgacgaagtggcctactttcagctttccggcggtactaccggcacgccaaagcttattccccgtacccataacgactattactacagcgtgcgccgcagcaatgagatttgcggtttcaacgaggatacgcgttttctgtgcgcgattcccgccgcgcataactacgccatgagttcgccgggcgcgctgggcgtctttcttgccaaaggaacggtagtgctggcgaccgatcccagcgccacgctctgtttcccgctgatcgaaaaacaccagattaatgccacagcgctggtgccgcccgcggtcagtctatggctacaggctatccaggagtggggcggcaatgcgccgctggcgtcattaaggttattgcaggtcggcggcgcgcggctttctgcgacgctggccgcccgtattccggctgaaattggctgtcagttgcagcaggtcttcggtatggcggaagggttagtgaactatacccggctggacgatagtccggaacggattatcaatacccagggaagacccatgtgtccggacgacgaagtgtgggtggcggatgccgacgggaatccactgccgccgggcgagattggtcgtctgatgacgcgcggcccctatacttttcgcggctatttcaacagtccgctacacaatgccagcgcctttgacgccaacggtttttactgttccggcgatctgatctccattgatcaagacggttacatcaccgttcacgggcgtgaaaaagatcagatcaatcggggcggcgagaagatagccgccgaagagatagaaaacctgttactgcgccacccggtggtgatccatgcggcgctggtcagcatggaagatgaactgctgggagaaaaaagttgcgcatatctggtggtaaaagagccgctgcgagcggtacaggtacgccgtttcctgcgagagcagggcgtggcggaatttaaattaccggatcgcgtggagtgcgttgcgtcactgccgctgacgccggttggtaaagtcgataaaaaacaattacgccagcggttggcgtcacgttcaccgctctgaaggagaaagagagatggcaatcccgaaactacagtcttacgcgctgcccaccgcactggatatcccgaccaacaaagtgaactgggcatttgagccggagcgcgcggcgctgctcatccacgatatgcaggattactttgtcagcttttggggccgcaactgcccaatgatggaccaggtgattgctaatatcgccgccctgcgccagtactgtaaggaacatcatatcccggtctattacaccgctcagccgaaagagcaaagcgatgaagatcgcgcgttactcaatgatatgtgggggccgggactgacgcgctctccggaacagcagaaggtggtagaagccttaacgccggatgaggcggatacggtgctggtgaagtggcgctatagcgcgtttcaccgctcgccgctggaacagatgttaaaagataccggacgtaatcagctcatcattaccggcgtgtatgcgcatattggctgtatgaccaccgctaccgatgcgtttatgcgcgacattaagccgtttatggtggcggatgcgctggcggatttcagccgggaagagcatctgatggcgctgaactatgtggcggggcgttccggtcgcgtcgtcatgaccgagtcgctgctgccgacgccggttcctgccagtaaagcggcgctgcgggcgttgattctgccgttgctggatgagaccgacgagccgctggatgatgaaaacctgattgattatggcctggattcagtacgcatgatggggctggcagcgcgctggcgtaaagtacacggcgatatcgacttcgtgatgctggcgaaaaacccgaccattgacgcctggtgggcgctgctttctcgcggggtagagtaatgaccggctttgatttttcagacaaaacggtatgggtgaccggggcggggaaagggatcggttacgcgacggcgctggcgtttgtcgacgccggggcgcgggtgatcggcttcgatcgcgaatttacgcaagagaattatccctttgctaccgaagtcatggatgtggcggatgccgcacaggttgcgcaggtgtgccagcgtgtgttgcaaaaaacgacgcggctggatgtgctggtcaacgccgccggtattttgcgtatgggagcgaccgatgcgcttagcgtcgacgactggcagcagacgtttgcggtcaatgtgggcggggcatttaacctgttttcgcagacgatggcgcagtttcgccgtcagcagggaggggcgattgtcaccgtagcctcagatgcggcgcatacgccgcgcatcggtatgagcgcctacggcgcctctaaagcggcgctgaaaagcctggcgctaaccgtagggctggagctggcgggctgcggggtgcgctgtaatgtggtgtcgcctggttcgactgacaccgatatgcagcgcacgttatgggtgagtgaagatgccgaacagcagcgtattcgcggtttcggcgaacagtttaagctcggcataccgctcggtaaaatcgcccgtccgcaggagatagccaataccattttgtttcttgcctccgatctggccagccacattaccttgcaggatatcgtggtggacggcggttcaacattgggagcctgacgatgatctggaaacggcatttaacgctggatgaattgaacgctaccagtcagaacactctggtggcgcatctgggcattgtttacacccgtctgggcgatgacgtgctggaggcggaaatgcccgtcgatgcccgcactcatcaaccgtttggtctgctacacggcggcgcatcggcagcgctggcggagacgttgggatcaatggcgggttatctgatgacccgcgacgggcagtgcgtggtcgggaccgagttaaacgccactcaccaccgcgccatctcgcaggggaaagtacgcggcgtttgcctgccgctgcatctggggcggcagaatcaaagctgggaaattacgctctttgacgagcaggggaggcgctgctgcacctgtcgcctgggaacggcggtaatgggatagttctggcaaagtaaaatgcaattgcagcattaacgaagaaaggaagtgatctggttaacactgtaatgtaaaaaatgggtaacaatccggttttatcatgttgttgtgttgttaattacggtaaaggtgttatagaaacaaaatgtaacatctctctggaacacccaaacggacaacaactatgaataaatcagggaaatacctcgtctggacagcgctctcagtattgggtgcgtttgccctgggctatattgcgttaaatcgtggggaacagatcaacgcgctatggatcgtggtggcgtcggtctgtgtctatcttattgcgtatcgtttttatgggctctatatcgccaaaaaagtgctggcggttgacccaacgcgtatgacgcccgcggtacgtcataatgatggtctggattatgtcccgaccgataaaaaagtgctgttcggtcaccattttgcggccattgctggcgcaggtccgctggtcgggccggtactggcggcgcagatgggctatctgccggggatgatctggctgctggcgggcgtcgtgctggcgggagcggtgcaggactttatggtgctgttcgtctcgacccggcgcgatgggcgttcgcttggcgagctggttaaagaggagatgggcgcgacggcaggggtgatcgcgctggtggcctgctttatgatcatggtgatcattctggccgtcctggcgatgatcgtggtgaaagcgctgacccatagcccgtggggaacgtacactgtcgcgttcactattccactggcgatttttatgggcatctacttgcgttatttgcgtccggggcgcatcggcgaggtgtcggtcattgggctggtatttcttattttcgctattatttccggcggatgggtggcggcaagcccaacctgggcgccgtactttgattttactggcgtgcagcttacctggatgctggtgggttatggttttgtcgcggcggtactgccggtctggctgctgctcgcgccgcgtgattacctctctaccttcctgaaaattggtacgattgtcggtctggcggtcgggattctgattatgcgtccgacgctgactatgccggcgctgaccaaatttgttgatggtaccggaccggtctggacgggcgacctgttcccgttcctgtttattaccatcgcctgcggcgcggtctccggtttccatgcgctcatctcctccggcacgacgccgaagatgttggccaacgaaggccaggcctgctttatcggctacggcgggatgttaatggaatctttcgtcgccattatggcgctggtctccgcctgtattatcgatccgggtgtttactttgcgatgaatagcccgatggcggtactggcgccagcggggacagcggatgtcgtagcttctgccgcgcaggtggtcagtagttggggtttcgctatcacgccggatacgttacaccagattgccaatgaagtcggcgaacaatccattatctcccgcgcaggcggagcgccaacgctggcggtagggatggcctacattttacatggcgcgttgggcggcatgatggatgtggcgttctggtatcacttcgccattctgtttgaagcgctgtttattctgacggcggtggatgcgggcacccgtgcggcgcgctttatgttgcaggatttgttgggcgtagtgtcgccagggctgaaacgtaccgattcgttgccagcgaacctgcttgctacggcattgtgcgtgctggcgtgggggtatttcctccatcagggcgtggtcgatccgttgggcggtattaacaccctgtggccgctgtttggcatcgctaaccagatgctggcgggtatggcgctgatgctttgcgccgtggtactgttcaaaatgaagcgtcagcgttatgcgtgggtcgcgctggtgccgacggcctggctgctgatttgtacgctgacggcgggctggcagaaagcgtttagtccggatgcgaaaatcggcttcctggccattgccaataagttccaggcgatgatcgacagcggcaatattccgccgcaatacaccgaatcgcaactcgcgcagttggtattcaataaccgtctggatgccgggctaaccatcttctttatggtggtggtcgtggtgctggcggtcttctctattaagacggcgctggccgctctgaagattgataaaccgacggcgaatgaaacgccgtatgagccgatgccggaaaatgtggatgagatcgtgacgcaggcgaaaggcgcgcactaatctttttacatcaatagccctctccagaataaggagagggcatttgaatgacaggtgacaacgatgttcgatacgctttcgaaagccggaaaatatctgggacaggccgcaaaaatgatgattggcgtgccagactacgacaactatgttgagcatatgcgcataacgcatccggatcagacgccgatgacctatgaagaatttttccgcgagcggcaggatgcgcgctatggtggaaaaggcggcgcgcgttgctgctgagggttgccaggcctgataaacgcaacgtcaccaggctatattctgaaaaattcaactttttcaaacgccgcacgcagggtgtctggcgttaacgtcaccggtaaatagtggatggattcgaccgggcgcagggtatgcgcgatgaccctatcgatctcggcggtgttatgaatatccacgtccagttcgctaagccgggccggcagatgaaatcgccggtacgctgtaatcaattgcgccagcacgtcatcttgtcccagtagcgcgctttgcaccagaatgccataagccactttcgttccgtgcaggaatttttccgtttgcggcaggacggtcagaccgttgtgtaccgcatgggcggcggcgacacgggtatagcgttccccgaggccgccgaccataccgccgccagcaataatcgcatccaccacgtcgcaaaatgcctgggtcagccgacgctgctgtttatccgctaatgcttgttcgctgctgtccagcaggagatcgcgaatagcgcacgcgctgttaatgcccagccttacggtcaatggcaatgtttcaggctgcggcgcaagcacaacggcttcataccatttcgccagcgtatcgccaatgccagctaacagatagtcatcgggcgcctgcagaataatgcgcggttcgaccagcaccagaaaattggcatcatcaaaaatttcgaactgtaacgcctgtcccgcgtcgttataccagacggaaagcggtgtccaggcggcgcaggttgccgcgattgtcgggatagcgacaaacggcagcgccagacggcgggcgagcgctttggcggtatcgagcagcgcgccgccgccgacgcctatcaccacctgacgatcgtcgttgcaggcgtgcgccagttgggcaacatggcgttcgctacaatggccggtaaacggcagatgctttgcgccagcacgttcaaacgcttccggcaggtaaggccgggcggcggcaatcgcgcgttcgccgtacacccaaacggcgtgggaaagctgttccggcgtgaaaaagtcggtcagtctttcgaggcttcctgcatgggaaaaataattcgccgggccggtaacgacgcggatctcagtgtggttcatgttgtgttgtccttagggtcttctcaccgttgttattatatttagacatctaaacgtcttgattgccaaatactaacaccctgtgatagtgtgtcaacaaccacatcactggcgggtatgaagataatgagaaataacccactgattccaaaaagcaaattgccaaatcttggtaccacgatttttacgcaaatgagcgcgctggcgcagaaacatcaggcaataaatttatcgcaaggcttccctgattttgatggtcctcgttatttgcacgagcggttggcttatcatgtcgcgcagggcgcgaatcaatatgcgccgatgacgggggcgcaggcgctgcgggaggccattgccgataaaacggcggaaatatatggttatcgacccgatgacgtcagtgatatcaccgtcacagcgggcgcgacagaagcgctgtatgcggcgattaccgcgctggtgcgggcaggggatgaggttatctgtttcgatcccagttacgacagctatgccccagccgtggcgctctccggcggcgtgttaaaacgcatagcgcttacgccgccgcattttcgcgtcgactggcaggcgttttcggcgttgcttagcgagcgcacgcgactggtgatcctcaatacgccgcataatcccaccgctaccgtctggcgtcaggcggatatcgaggcgctgtggcaggctatcggcgagcgggaaatttatgtgttaagcgatgaagtgtacgaacatatttgttttgccgccgaaggtcatgccagcgtattggcgcaccctcagttacgagagcgggcggttgccgtttcatcgtttggtaaaacctttcatatgacaggatggaagattggttactgcgttgcgcctgcggccattagcgccgaaatacgcaaagttcatcagtacctgacgttttgcgtcaatacgccggcgcaactggcgctggcggatatgctgcgcgccgcgccggaacactatcgcgcgttacccgatttttaccggaaaaaacgcgatgtgctggttaacgcgctggcgcaaagccgattaaaagtgctgccctgtgaaggtacctattttctgttaatcgattacagcgcagtgtcgacgctaaatgacgttgagttttgtcagtggctaaccgaagaagtcggtgtcgccgctattccgctctctgtcttttgcgccgcccctttcccgcatcagcttatacgtttatgtttcgctaaacaggaatcaacgctgctggccgccgcagagcgcctgtgtaaactgtagttatttaaccgtccacgctctggagaatcgacggtctgcaaaaagctcctgcaggccgttgatctgtttcaggcgcaggacttcatcggcgtccatacctaactcctggccgattttgctctcgtcccagcctagcagagaaagttcgcgcacgatttctgacatggcgtggatctggtggcgcccgcgcgcgcggttatgccgaatggttgccgccatgcgttcgtgacgttctctgtccagacacgttatcggcaggtagcctttcagacgccttttcagggccgcttttcctttgcccagctcatgacggtgaaaaccgtctacaatctcgtactcctccgtattggcctttaccaccacgatcggctgagtaaacccatcttgttcaatcgatttaagcagcagttttttctccggcggcgcaacgttattcgggttgtagtcattaggtgaaatatgatcgtttttcacccacaggacacaatcgacaggctcatcgcgaaaaggactaacgctatgtatcgccattctaaattcattaatggcggcgatcctctcctcttcaggcagttcagagagaaagtgagttatttcggttgtgagtcggtgttgcataagatcccccattcctggcgtttagctttcatacgttcgttataacgctggtaattcttaggttttgtcggactgaatgacagcgcccggcaccagtaatcattgttcagtaatactttgcagatccgtcgccacgacggaatatcgcgcgatccgatatcgccatgctgcgtttgtggaatggtgtgcatgccttttttcttataccactgcaaataaacggcgattttattacggtaatgttcggcagtgacttcaggcatactgtgtagcaggagcagcgcgtactcttcccagttaaggtgatcgggttttaaaattttccggtggccgtaaaaatggctgtcttgtccggcgtatattcctccgctgagtgcgccgctgactctggcgcacatggccgcccagcgctcaggttcgataacatgatacagccataacccctgtcgttgttccgggccgaacggttcgcaaatacgcatgtaacggggcggtactccagcctgatacatcaaattatacaaagggttacatggtttacctgttttggcgaaccaggtccagatatctgcggttttccagtcatagatgggatagatataccaggtgtgccccttaggggctaacgtggtccagggcttatcgtcggcaaagcgcagcttatgcgagttagcgatagcggcaaatcggttataggattcgtcggaacgaataccgaccagcatagcggcaggacgtttttctgaaaaccagtcggcaaaatcgcgaacgaactgttcaaaggtcatgccgtgttgataaaaggaaaaaaaggccggatcggtaatcgcatcttctggcggttgtcgtacccagtcggtacccggctgccaacactgccactccggctggtattgtgaaagggaattttgtgtggttaagggtaatgcgacccaataaaaacgctcaataacgtccgcgtagtattcacgtaacgattcaatataggtgatggtacaggagaattgcgcttcccagtcaatgaagagaacatggatctttttattcattttgcgcgccaacgttgccgtcaggtgcaacataagtcctgaatctttaccaccagaaaatgagacgcagacccggggtaaggtttccagggtccacattatacgctcttgagccgcttccagaacattttgctcgagcggaactttataaaccgacatctctggatagtctccgatgtgttaactacagtatattcgaaataattaacataaaggataagcagattagatgaacttgcaatgctttattatatttgtaaaataaatatattccataaacatatacattaaatttatattaatatccgttatctgaccttcttattaatgtttttttgtgatgtgctcaatgagctcagcaaatccgctattattcagcgaagccctattatacataagatagaattgtatgggagcaatggtaaaaggtatggtgacttttttaagtttgatagaggaagagtaatagtcaaaaaatgtttgtggtaaaaaaccaataagctccgtggagctgatagagttggcgatggtcatcagcgatttgcttctgaaaccaattattctttcccccagcacatcatccataagtgaatgatattctttcataccggttgcccgggagacgagttgcgtaaatgactcttgtagaatttcgtcgatagtggcggtgtcgcctagtcggggatggttttcactgcaaaccaggatgcattctagcctattaaagtgagtacaaacaatagaacgattattcagtggggccattgaaaccacaatatctgctttgcggtaggcaagcagatcttcaggcagttcgtcagtggtcaaaatgtcgtgatgttcaatttcaacctgtggatctttgcggatatatttaactaatttcatcacatattgggtgatcaacagctgtgggctgtagataataaattttttcttcaggctggactgattcattatattaatagtttgttccaggctgttaagattattttctaaatgataatgtaaattaatgcctgttacggtaggcgtaattcctttgcctgaacgaataaatagagggtcgttgaattgcgtgcgcaggcgttgcaatgactggcttacggcagaaggtgtaatatagagtgtttctgctgctttgctaatgcttaaatgttgatagatacattcaaatataaccaacaggttaagatcaaattttttaaggtcgtaaaggttagccatagtatgttcccggcattatcatggtatcttccatgattatgacttaatctcaataatttaccagagttatgtttattaaacttaatgtagagtttatttaaactaaaataccacagttatgaatattttagcgagtaaataattacagtaaaggcggacataacgtacacttttataaccacgccgttagtctaaaaaggctgtgtcggatgacatgctggtctggcgtcgcgttaatgccagtcagaggttggcccgacaaacgtagcgctatcgggcgtggtacggttaagctccagctttgctaatttctgcgttaaggctgccccatcatggcgtccagttgcgctttttccggtaaacccacaacctgttgcaaaatcttatctttattcatgtaataaattgctggcgtcgcgttagcgccaagatcgtccattagctgctgattctgattaatgactttcatctgcgccggggggatggacgccggaacttccagcttcatctttcctgcggaggcttcatagtcatgccaggttttcgccgggtctttcgcggctaaaatcgctgcggctgtggccgggctttccggtttaatcacgccgaccagtaatgtgcgtaattgtaccttgccggattcgacccacggacgagcttgttgccaaaactgcttacaataggggcagaaagggtcggcgaagacatacagcaccaccggcgcgtcttttttaccgtcgagtatccatgacgctttttccattttctgccacatttcacgtccggccggtgcatagatctctttttctatcagggcgttgctaagattttcgcctttttcattatacatatagccggaaatcgcgtgtttaccgtccggcgtcaggtaaatcgtgacgcccatatcctgatactttccgagatagcccttcatgccccccggcgcctcgaaggatttcaggatagttataccctgtttttcaatggctttaaccggcgcaggcagttcttccgcgtgggcgagaatgggcagcatagcaagcagcaatgtacgtttaatcatattttttccttttaatatcaaagcgaaaagagtattaatgatgatgcctatcacagacataggtaagagctggcgtgccaggattgccctttctgtgctggggtgatgtaatccttttcgctgttacagcctttgttaaggtaatgtagagcgcaacacttagccagcatatacgctatggatttcgagttgcagacaatacgtctgtaatttgcaagacgagtcgtactggctctgaagttacctacgggtagttcaggtaatggggccgcctgtcaggcggcctttttactttagatggctgacagggcgcagtgttcacaatgtcgcccgaatcgggttgttagttaacgcttattgatttgataatggaaacgcattagccgaatcagcaaaatttcgttaacttactcctcaacgaaaacacggaggaagtatagatgtccttaattaacaccaaaatcaaacctttcaaaaaccaggcgttcaaaaacggtgaattcattgaagtcaccgagaaagataccgaaggccgctggagcgtcttcttcttctacccggccgattttacctttgtttgcccgactgaactgggtgacgttgccgaccattacgaagaactgcagaagctgggcgtagacgtttattccgtctcaaccgatactcacttcacgcacaaagcatggcacagcagctctgaaactatcgcaaaaatcaaatatgcgatgatcggcgacccgactggcgccctgacccgtaacttcgacaacatgcgtgaagatgaaggtctggcagaccgtgcgacctttgttgttgacccgcagggtatcatccaggcgatcgaagttaccgctgaaggtatcggccgtgacgcgtctgacctgctgcgtaaaattaaagcagcacagtacgttgccgctcacccaggcgaagtatgcccggcgaaatggaaagaaggcgaagcgactctggctccatccttagacctggtcggtaaaatctaaatttccgtcgtctttcacgccatagctgcgttggcgtcgcctgctcaccccggtcacttacttcagtaagctcccggggattctcaggctagccgccttactctgacgtgaaatactttggaaattgtttcagtcatgggcgcacccgcgcccatttcatttcagcaccatgacgcaagttgcattaatgcagtcccgcgaagtcggcttgcatgatgatgttttcagagagggaagaagaatgctcgacacaaatatgaaaacccagctcagggcttaccttgagaaactgaccaaacctgttgagctgattgccacgctggatgacagcgctaaatcggcggaaatcaaggaactgctggctgaaatcgccgagctgtccgacaaagtcacgtttaaagaagacaatactctgccggtgcgcaagccgtctttcctgattacgaatccaggttctcagcaagggccgcgctttgccggttctccgctgggccacgaatttacctcgctggttttggcgctgctgtggaccggcggtcatccgtcaaaagaagcgcagtcgctgctggagcagattcgcgatattgacggcgattttgaattcgaaacttattattcactctcctgccataactgcccggacgtagtgcaggcgctgaacctgatggcggtgctgaacccgcgtattaaacatacggcaattgatggcggcaccttccagaacgaaatcaccgaacgtaacgtgatgggcgttccggcggtatttgttaacggtaaagagttcggccagggacgtatgactctgaccgagattgtcgctaaagtggatactggcgcagaaaaacgcgcggcggaagcgctgaacaaacgcgatgcgtatgacgtactgattgtcggctccggcccggcgggcgcggcggcggcggtctactcggcgcgcaaaggcatccgtaccggtctgatgggcgagcgcttcggcggtcaggtgctggataccgtggatatcgaaaactatatctcggtgccgaaaaccgaaggccagaaactggcgggcgcgctgaaagcgcatgtcagcgattacgacgttgacgttatagacagccagagcgcaagtaaactggttccggccgcaacagaaggcggcttgcatcagattgaaacggcgtccggcgcagtattgaaagcgcgtagtatcatcatcgccaccggcgcgaaatggcgcaatatgaatgtgccgggcgaggatcagtatcgcaccaaaggcgtcacctattgtccgcactgcgacggtccgttatttaaagggaagcgtgtggcggtcatcggcggcggcaactctggcgttgaagcggctatcgatctggcaggtattgtagaacatgttacgttgctggagttcgcgccggagatgaaggcggatcaggtgctacaggacaaagtgcgtagtctgaaaaatgtcgatatcattttgaatgcgcaaacgacagaagtgaagggcgacggctcgaaagtggtgggactggagtatcgtgaccgtgtcagcggcgatattcatagcgtcgcgctggcagggatttttgtgcagattggtctgttgccgaatacccactggctggaaggcgcgcttgagcgtaaccgcatgggcgagatcattattgacgccaaatgtgaaaccagcgttaagggcgtcttcgccgcaggcgattgcaccaccgttccttacaaacagattatcatcgccacgggcgaaggggcgaaagcctcgttgagcgcctttgattatctgattcgcaccaaaatcgcataaaaagaagtaagcacacctgcaaggccagttaactggccatcgtaaatggcccgatagtgtaagctattcgggcctgcggtgtttatgcctggggaacgcaccgggtaaaacaccttcttcattatcaatactctgaaaccgtctgttaataacagacggttttttatttcaacggtattctgtttttaaactttgaaacaataaaaaagccttctacggatttaactggaatttttctgtttttttatcaaagaaagattaagcgcttccgttaacatgcccattcttttttcttgatttatattgcatttgtatgtgaggttatttattcatggattcaatctatgaatcactgacggaattagaaaaaacagggcttacattgcgtgatttttttaattctcatgatagtcgttcactgaaatctgcctacgtgagattaaatcccactgctgcggtaaaccttaccgatcgggcgtggctggaggcggagtatgactttaatgcgctattcgtcggtcctggcaagctgctggctgcgcctttcgcttcagtgtatctggaagatgatgcgctggtgatgggaaaggcgacgctggagatacgggattttatggcagcgttgggattatcggttaatcaggagagcaatatccctgacgatcatatttcctgcgtgctggaattgaccacactattactggctaatacccggcaaacgtcaccataccgctctactctcactcaatatatcaataactatttaacaaagtgggtgccattatatatcgaaaaaataaaaactcatgcacaaacgaccacgttatatacggtggcggacatcttattttattggcttgctgaattaaaacgagaatatcaatatgagtaatgagacgggacatctgaacagacgttcttttttaaaggggatagtggcactgggcgccgttgcggctttacccggaggattactgacctcccgatgcgcgcttgcgcagccgcctgttccctttaaccctaaaacgtacaaaatttatcgtaacgcgtgtccgcgtaactgctatgacacctgtagcctcaagacatgggtaaaggacggggtcattactttcgtggaaggtgcgccggaatcaacatttactcacggtaccccttgcgtcaaagggttaagctatccgcgccgggtttatagccccgatcgtattaaatatcccatgacgcaggacgttcgcggtagcggcaactggcgtcgcatctcatgggaagaggcgatgcagcgcattgccgccaaaatgctggagattaagaaaaaagacggttctatgctcggtctggcgctgaccaaatattccggtaagtttggcgtgctgaactatgccgttgaagggatgatgtcctcgcttggctataccacccgttttgccggtacgccgtgctggcctgccggtatcgacgcgcaaaactacgacatgggcgacatgtggtgtaacgacccggaagatatggtgaaagcgaaatacatcattatctggggcgccaacccggcctggtgctcaatgcacagcatgaagtacatctatcaggcgcgcgagaaaggggcgaaggtcgtggttatcgacccgctgctgtcgcagactgctgccaaagccgatctctacctgcgcgtacggcctggctcagacggtgcgctggcgctgggaatggcgcgtcatctggtggataaaggcctggtggatcaggattttgttaacaacgatgctcacggctatccggaatttgaagcctatctgcgtaaccatgtaaccgtggagtgggcggcagaaatctgcggcctgtctgcggatgtcattcgccagctggcggaagagtttacggcggttaagccggccacggtctggattggttacgggatgcagcgtcatgtcaacggcggcgccaacgttcgcgctatcgatgcctttgtcgctatgtccggcaacatcggtgtcgaaggcggcggcgcgcgttatggccatctgcatacctggggctttaactataacgccatgctgcagaagccgccggtgggcgctattggcataccgggagcggcgggcaccaccagtgaattcggggctgccgctggcagcgacgccgtgcagtactccgatcgctctctgaatatcaaccagacggcgcaggggattctggaggccaacgatccgccggttcgtatgctgtgggtcgcctgtaaaaacccgtttgcccaggatttcgatcgcagcaagatgaaaaaagcgtttgaaaaactggaaatggtggtctgcgccgatcagttcttcaacgaaacggtgcaacacgctgatatcgtgctgcccgttaccaccgcgtttgaagagtggaacgtggatgcttcttactggcactactggctttccattaatcagccggcgattaagccgatgtatgaagcaaaatgcgaccttgaaatcgctaccatgctgtcgcgcaccattaataagatggcgccgggttcctgtaccttcccgcaagagttcgatcacaagcgttggctggatcaggagttcaacgacggtatggcgaaaatgttcggcatctcttcctgggacgatctgctggacgggccgaaaaaagcgattctgccaagttcagccgcctggtacgatcgcaagttcaaaacgccgtcaggcaagtatgaatttaaatctgaactggcggagaaaaacggccacaccgcgctgccggaatacaaaccggaagccgagagcaaactgccgttccatctgtttacgccgcacgtgcagtttggcctgcactcgcagtttatcaacctggactggatgcaggtgttctacccggaaccgttcgtttatatccatccttcttccgcgaagaaaaagggcatcagcgagaacgatctggtcaaagttttcaatggcaccggtgaagttgagctgcgggcaaaagtcaccaccaacgtgccggaagattttctggtgatgtatgaagcgtggttcccgaaacggcagtacaacgtgcaaaacgtcgtggccgatacgcctgctgatatggggctgatgaaaactggcgcgccgggcgccgctatccacagtcagtttgctgacgttgtattgatcggtaaaggggaatccgtagcatgagacgtgcgtttttagtgaatagcgataagtgcatcggctgccgcggctgtgctatggcgtgtaaaagctttaaccaactggagccggatcgcttctggcgctacgtttatccgttggataaagacatctatccacatgaagagcgggcgttttactcgctggcctgtaaccactgcgaacatccggcctgcgtcgccgcctgtccggtgggcgccttgtcgattatcgatttggatgccgatcctgtgcccgataatgcggtgcagtatccgccagggttcccgcatatgccacagcttaatccaggaacgcgctttattctggcgcgccagcctaagcagccggaggacaagtaatggaaaaatatgaactgccgctggtgttttttacggtattaagccagatgtctgtcgggatggctttggtactgacatggcgtacgctgcgtggtgaagtggaaggccagcgtttctattggttggccaccgggctggtgctggcattggcgtctattgccgcgattctgcatctggcgcatcccgatcgcgcttatgatgcgctgattaacctgcgacatgcctggttaagtcgggaaatcctgggcgccacgttgtttggcgcagcggtcggcgtaacgttcctggcaaagggacataaagcgatggctcttatcgcctccgtgttcggcgtgttactggtggcggtgcaggggatgacctacgccgcgccagcgatggtggctatcgctaatggatttaccatgctgttattttttattacggtatgggtcatgggttgcgcggcgattccgctgttaaaactcaggcctgccgttcctgcgttacgccaggggattgtggtgtgtatcgcggtacttatcgcggcgccgctggtgtggttaagcgggggaacggtaatgcagatgacggcgcgttcatggctggcttcaccgttttatctggcaagcctggtctgccttgcgctcgcttttgtcgccagccgtcacggtgattcgcgcccgaaacgcctgttcgtcttgttattcgtcggcgtatttctgagtcggctggtcttttttggcgacacggtgagtactattgtgaatatcgggcatttgtactaacgatgatgcagtaaaaagccctgccaggcgtgacctggcagggcgtgtaagtttttagccaccagagttaacgcacaaccaatacgggcagcgtcgcatggcgcaccacgcttgaggcgttagaccccaacaggtgtgtcgtgatggacggattacgcgaaccgattaccacgacatccgcatccagttcttcgcccatctcattgacgacatcgcgcacgctaccaaagcgaacatgcgttttaattcgtgaaggatcgatactgaagtgtcccaccatcgtttgcagacgcgtttccgcctcatgctgtaaatgttcttcaaagcgacgcacgtcggcggcaaagcggtgcagactcatgctcgcggacccaggcagtacatgcaacagatgaatgacgccatcctgttgcgccagaaactcagcgtggcgaatggctttatcgctaagttccatttcaaaaacatcaaccggcataatgattgtcttatacatacccgttactccctgttaatcaatactgaatttattcaagcatataataatgtttctttctgctatttgtctggcaattttaaatattacggcaacctgatgttaaaaaagttgtgtattttccaggaaaaatcctaaagccgcctgttttgccggcagtctctccgggatagctacccttttatagtcgaacgtgacattcaccgttaccccggaggctgcatgaaagcattgacgtatcacggtccacatcacgtaaaggttgaaaacgtacccgatcccggcattgagcagcctgacgatatcattttgcgtgttaccgccaccgcgatttgcggatctgatttgcatctctatcgcggcaagatcccacaggtaaaacatggtgatattttcggccatgaatttatgggcgaggtggtggaaaccggacatgatgtgaagaatattcggaaaggggatcgggtcgttatcccgtttgtcattgcctgtggtgactgttttttctgtcggctacagcaatattcagcgtgtgaaaacactaacgacggacacggcgcggcgatgaataaaaaacagatcccgccaccggcggcgctgtttgggtatagccatctgtatggcggcgttcccggcggacaggccgaatatgttcgcgtgccaaaaggtaatgtcggtccatttaaggtgccgccgctgttatctgacgataaagcgctgtttctttctgatattttgcctaccgcctggcaggcggcaaaaaatgcccagattcagcaaggtttcagcgtggcggtttttggcgcagggccggtaggattactgactatcgcctgtgcgcgactgctgggcgcggagcagatcttcgtcgttgatcaccacgcctggcgcctgcgtttcgccgaagaacgttacggcgcgataccgatcaacttcgatgatgagaacgatccggcggaaaaaatcatcgagcagacggcaggacaccgcggcgtggacgcggtaattgatgccgtaggctttgaagcgaaaggcagcttgacggagacggtgctgacgaaccttaaactggaaggcagcagcggcaaagcgctgcgacaatgtatcgcggcggtcagacgcggcggcgtggtcagcgtgcccggcgtgtatgccggttttattcacggctttttattcggcgacgcctttgataaggggctaacttttaaaatgggtcaaacccatgttcacgcgtggctgggggaattattaccgcttattgaaaaagggttgctgaagccggaggagattgtcacgcactatatgccgtttgaagaggcggcgcgcggctacgaaattttcgaaaaacgcgaagaagagtgccggaaggttatcctggtgccgggagcgacgtcggcacaagcggcgcagaaacaggcgacgggagtagtcaacccgatgccaggcggcgttgtctgaagcaggcagaaatgaaagggctaacggaaagaggatgcgcaggcatcctctgtgtaaacgcattaacgcttatgcagatgatttaacgcaggaagtcgcccgcggcttcaggctgatattcgagttccagcacttcgagatgggtggaggcgccgcccggcagttcccagtgaatggtgtcgccgacgcgcagtcccagcaacgccgcgccgacgggcgccattaccgaaagctgggtactgctgtccgtcatattggcggggtacaccagcgtccgcacgcgtgtttcaccatcgctcaaattgcggaatttaacgcggctgttcatggtgacgacatcgttcggcatctcttgtggcgaacacatttgcgcgcgatccagttcggcgttgagcgcgtcggcaatcggcagatccgcatacgcaggctgttccagaagacgatcaatacgttcggcgtcaaggtcgttaatgataatagtgggtctggacatttcttactccatgtcatcgatactgcgagtagtgcaggtaaatggtcccaaaagaaaaccctcaccgtctggcggcgagggtttaactctcatgatgatactgagacttaccccgtctttgaagtgatttagttcacattcgggtaaatcctcaaacgtcatagccctgagtgaattttagtctacattcgggcgtgttctcaaatgtggctacggttttaaacctctgcttcgtcaataaccggctttatcgataataaactgtttcccgcagttgccgggatgcggctgcggcaggaatgaggcagaggagagcggggcgttaatcatcgacgcctttaatgaaaactgaatctctgttaaataggcgggattgccatggcagtttactttaacggctttgacattatcctggccccacatttgtgcgacgacgctatcaaactcagcgcggctaacggttttgccgtaattatccgtcagaaactgccccagtgcgctgtcttttatcgccttatccagccgtatcatggtgccgaaataggcattgggatcaaacccgaaacaggcgccatgtttggcatattcgtagcgctccagacaggaattcccccccgcgccgggcatcacttccttaagcgctgccgcgatgtcaggcgaaagtccgggggcggaggctgagcatttccggctggccttgacttcaggcagattcgggattggccgcgtcgcacaaccaaagcgctgccagcgtctctggtcaacaccgcgtgcggcgatagatttgggtaatcctggccacaggccgtggacggtcagaaagtctgctttgttggctggctctttttgcagacggcactcatcgggctcccgatggcggcgttcatgctggctttgacaaaaaccggtttgccaggaaagcgccagcacatagtcagtgaaatcaccgtactgttgcgcctgaagttcgtcggcgttggcggcaaaaatcggggttaagagggcagccagcagcggactgtaatgccatattgtgttcatgatgaattcgataatttatacacattatgaatgttacccatttaatcataaaaaatgccgctcaggtgaacctgaacggcatcatttttaacctgcgttggcgtaatgtttaattccacattgccaaaatcggccagcccaccagcaacagcatcgcgatatagataacgccaaagattgcgccaagccgccagtagtctctggatttcacgtaaccgcagccgtagataatcacaccagggccggtggcatacggcgtcagacagcccatgataccgatagacagcaccagcagaatacacagttgttccatcggaacgcccggaatgcctttacccaccgccagaatgaccggcagcatggtcgcggtgtgagcggaaagactggcgaacagatagtgcgcgaaatagaacaccagtaccagtacaatcacggttgcatccggagagaaaccttccagatgcgtactcatggtattggcgaaccagtcaataaagccggagcgggttaagccattggccatgaccaccagcgtagcgaggttcaccagggtgttccaggcgctgttgtagcgcgtaatatctttccacggcacaacatgcaacgccagcatcagcgagacggccagcagacccacggcagtggcgttgatgatttttccaccaaaaacccacaatcctaagctaagcagcaccaggccaatcagcgtccactctttgcgggacagacgccccatgttttttaactcgccgccagcccaggccgcgacttccgcactgtgggtcacttcaggtttataaagtacataggagagccacggcgcaacgatcagtaaaataatccctaccggcagaaagctgagaaaccactgcagccagctaatctggacgccagcgatcttgctgacgaactccagacctaatacgttcggggccgcgccagtgacaaacatcgaagagctcaggctggtactgatcaccatcatccacatcaaataaccgccgatgcggcgtgcggaaggatcgtttggaaacgatttaaacagcggcggcaggttcttgatgaccgggaagacagtcccgccggtacgagccgtattggagggagtaaacggcgccagcaaaatatcgataatgacaatcgcatagccgagcgtcagcgtgcgtttacccatgaattttaccaaaaacagcgcaatgcggcgccccagcccggtcacttcgtagcccagcgcgaaaataaacgcgccgaaaaccagccagaccgtggtgctggagaaaccggcaagcccccatttcagcgcctgtttactggctttaaacgccggatcggccagttctgaagcgtcaaatagcaggtaattgctgccgataacgcaaatggttacggcgataaaactgatcgctgtcgccgggatcggctccaggatcataccgacaatcatcgcgacgaaaaccgcaaaatagtgccaggcctgcggcggcataccatctggaacaggaattaacaacatgacgcccatcaccactaatggggccaacaacttccatatattatctttggataaagacataaatgactctccggaaaggatattttctataattgtgttaatgattaacttgcgaaatttgcgctaaaaaccaggtcacgatcagcagatcggcgctaccgcctgggctgagattgcgttcaatgcattgctgatcgaaccggtggagataaacgagatcgtcaggcgtccgtatgccgccctgctgtaataagaccgcagcctgctgctgtaaccagcgcagaccgtccgccccgccgcgcgacgcgacgttggtatcgccgttaagcgacatcagcagcagtaaggtatcaagcagcgccagttcgggatcgcgcccctgcgccagcaatgcgcggtagtgcggcaacgcgtggcggatgaccagcggatagcccgcttccgcttcaccgcgcgcgccggttaatcccagttgctgatacagccgctggcctgcggtgagctgtaggttgttctggcgcagttcgcgcgttgtcaggccgcggcaaaaatcggcggcggtagcgcagagtgtttctgcggcgatcggctggcgtagctgatacaggcggccaatggcggcgcacagtaaccccagcgagaaaatgctgcctttatgggtattgacgcccgccgttgcgcgaaacatcgctgcttcacagtccatccccaatggacgcaggcccgccagaactgactctggcggcaggcgcgtgcagctggcgccatattccataaagcgcggcagccagtgtcgaatcgcctccgcgctgcggtgaaaatccgccagcgccatatctttgtgcgcgccgcagtttagtcggtctaccagaccgggttttggcgataaatttacctcggtcagcatggcgcgccaggccaaatcggcccagacgtcatacagcgactgaggctgaatggaggcgttagtcgggttggcgggaatcggcatcatgcagcagcgcctccatatgaatcagtaaatcagtcagcgcgtgggttttaccccgcgcgcattcagccgcgctttgcccgcacagcagacagcggcgagcgggaagcgcgaaatggcggcgggagagtatttcgccttccgccgtcaggacatcgatatcccacaggcgccccagtggataacgctgttcaagcgcgatggtcgcctgtttgagcgcctgagcgggcgcgtcaatcgccagcagcccttccggcccgctggcggaagccagtgcagcctgctcccggatagtccagccatactcttctgccagcgtgtgcagggcagtcacgccgtgattaaagatccggcgggttaacgcgctgtcttttatcgggcctggcgccaccacggtaaaggagaccagtggagtggcgtggcgcgttagccaggcgcgctgtcttgcttgtctctcatcccggctggcgagcagctcaggaatagaaacgtcgtgacaggtggcgagttcaggaaacaggcgcatggcttattccttcacctgatgcaccacatcgatcactgaaccgtcgcgataacgcacgacagcaatcacgcggtcggtgaattcgatagggcggggctgaccggtaagcagttgcgcgcgttcgcgcagccactcaatcgataccactttcattcccgctgctttcaggcgttcagccagctccggacgcgccggattgacggcgataccgtgatcggtgaccagaatgtcgacgctggagcccggtgtgacgcaggtggtgacgttatcaaccagcgttgggatgcgaccgcgtaccagcggcgcgacgatgatggacagcgccgccgcgacggcggtatcgcagtgaccgccggacgcgccgcgtagaacgccgtcggagccggtcagcacgttaacattgaagtgggtgtctacttccagcgcgctcagtaccaccacgtccagacggtcgacggaagcgcctttagagccccagttggcgtactggttagcgctgatttcgatatggttcgggttgcgagccaaagattgcgcagcgttacgatcgaagctctgaacgtcaagcagtttgcggattaagcccttttcatgcaggtcgaccatggtggcggtgataccgcccagcgcgaaattagccacaatgttgcggctacgcattttgtcttccaggaagcgggtgaccgccagcgatgcaccgccggtgccagtttgtagggagaaaccttcgttgaagtagccggagtgagcaatgacttccgccgcgctgcgggcgatcagcagttcacgcggattagtggtcatgcgggtcgcgccagcgccgattttgtttgcatcaccgacttcttcgatttgcacgatcagatcaacctgatcctgagcgatgcttgccgggttatgcggatacggcagcagttgctccgtcagcatcacgacctgcttcgcgctgtcggcatccaccatcgcgtagcccagtgaaccgcaacaggctttgccggtataaccgttagcattaccgaattcatcgcaggagggcacgccaagaaatgcaacatcaatattgagttcgccgctttgtaccagatgtacacgaccgccgtgggagtgaatctgaaccggctcagccagcaagccgcgagaaatttcttccgccagcgggccgcgcaggcctgacgtgtagatgcggctgaccaccccgttacgaatgtgttcaaccagcggcgcatggcagtcgctcagcgaactggaggccagcgtcaggtttttgaagcccatcttcgcgatggtttccatcaccaggttaatcgtcagatcgccgccgcgaaacgcgtggtgaaaggagaccgtcatgccgtcgcgtaaaccggaacggcggatggcctcttccaggctggcgcacagtttgtggtcgcgcggtttttgcgcttgtagatccaattttgccgcactttggtaagcgctcagttcgctttcagcgtgacggctccaggctgctacgcgatcctggcgttgagattcatttttctgcgtcatttttttgccttattcttcgcgaataccggaaagttctgcacgggagagcaccagacgggcgcgttcaatcaccgggctgtcgaccatcttgccgttaagggaaacgacgccgagaccttcgcgggcggcggcttctgcggcttcaacgaccagacgcgcatgggcgacctctttacgcgttggcgcataaaggttgtgcagcagttcgatctggcgggggttgatcagtgacttaccgtcaaagcccaactgtttaatgtgggcggcttcttgcaggaaaccggcttcgttgttggcgtcggaatagacggtatcgaaggcctgaatgccggcggaacgcgcggcctgcaaaatggcgcagcgggcgaacagcagttcggtgccttccggagagcgttcggtgcgcaggttgcgaacatagtcttccgcgcccagcgcaatcccgatcaaccgttcagaggcgtgggcgatttctaccgcgcgggtaatacccagcggcgattccacggcggctaacaggccggtactgcccggttcgcgaccgcaggcgttttcaatgcgcagaatttcgttttcgatatcaatgacgtcctgcgcggtgtcggttttcggtaaacgcaccacgtccgcgccgccgcgcacgaccgcttccagatcgttgacgccccattcggaatccagcgcattcacgcggacaatggtttcgacgtcacggtaaagcgggtgttgcagcgcgtgatataccagacggcgcgccgcgtctttttcgcgtaatgcaacggagtcttccaggtcgaacatcagcgcgtcggccgggtagataaacgaattgctcaccatcgccgcgttggcgcccggtacgaataacatactgcggcgggtgcgggttttacgttgttgcagagaggcggaaatcattggcgatcctcccagggcagagcggcaataccgctggcgcgcgccagtagcgtttccagtcgggcgcgcaaaatgcagtccagagcgcctttatcatcgacgttcagttgtacgccgcgcacgtcgtagcgagaaagcacctcctggatggtggcgcgaatggcctcgccaaactgtttttcaacgctactgttgatttgcaggtcaatatcctgcgtatcgagcggcgcaatgcgtatcatcacatcgccggactcaagcgtgcctgcgacggctagctggtttattttcatttttcacctgttgctaatacgggggacttttgacgggctgccgcgctgcccggatggcgttcgaccatgccctgcaaatagcgcagggtggcgtcgggaaccagcggcgcgatagccgtgagatcgtgtttaaccagcagcttgcgtacccaggaggcggatatcggcgtctcctggaagcaaagccgctctatttccaccagcgtaatgggtggggcgggaagcgttggcgtctccagccagaaacgcatatcaaggttgtactgggcggtaacggtgcaaaacggctccgtaccgacaaagcggtgtgtgatgccaagcgcgggcgccagatactggcggaaaatcttcaggtcgatttcggtataacagtgattaataacgctctgctctttaatgaaatagcaggggaacgtcgcacgagaaataatgtattcggagccgcggtgaacggttaagcgcgggatatcggtggtccctttaaggaccagatcgagtcggtcttcatagggaaagcgtgatgtatcttctttgaccaggaacagatgcagccagtcgcactgtgccgccgcctgttggatcagatagcgatggccgttcgtgaaaggattggcgttcatcacaatacagccaattttctttccctcatgacgcaatgtcgccagcgattccgcataccgtttcaaccgggtcgcgctattttccattaagaccattacgccagggacgctggctatcgtcgaaaagctgcactgtttaaacagcgcttcgtattccgttttggtataaataaaaagatgggtgcagtgccgctcccaggcgagattaatcaattccgtcgccagcgttaacgctaagccttcgccgcgtactgattcgctaatggccacgcatttaatgatatttccggcaataccgccgcaggcaataagacggtcatcacggctgacggtaataaacacttctacagtggtatcgacgcttaaatcattctctttgagaaagtgagcgatctccgccatttttttattttcagagcgttttacccgagtgaatacattattgccaaacatagtaagaaatatcctggtgatatgcttgttgccacttttctgtatatgttgcgctgtgttgcaacttgataactttttcttttcagtcagagtaggagtttttttatgacgagttatttatttttctctctgacgtatacatcgtaaggagtattttggtggtaaattttgatttatttcacaaagcgttagatggtttttaagtgttttatggttttaagttttttaattaatttaatcgccattccggcggtgggttttagttgtttaattgatttaatgtggggaatctgtaacgattggtttttatatgcttcaagatgctcaaaacatttttattacatttgcgataaatctgaagagaaatgcccataaggaaccttaatgtcctgtcagaaaaataaaaagctgtttcctttttttcggcaactcgcgtttccgttacgtatttttctgctcattctggtggtttctgttttcatcgtggcagcgttagcacaatatttgtctgccagtttcgaagattatctggcgtcccatgttcgtgatatggcgatgaatcaggcaaaaattattgcttctaacgacagcattatcgctgccgtaaaaaaccgggactataaacgcctggcgataattgcgaataaactgcagcgcgggacggattttgactatgtggtgataggcgatcgccactcgatccggctttaccatccgaatccggaaaaaatcggctatcccatgcagtttacgaaacccggcgcgctggaaagaggagaaagttatttcattaccggtaagggctcaatagggatggcgatgcgcgccaaaacgcctatctttgacaacgaaggcaacgtgatcggcgttgtttcaattggctatctggtcagtaaaatcgactcctggcggctggacttcttattaccgatggcgggggtttttgtcctgttgctggtggtattaatgctgctttcctggtttttcgccgcgcatatccgccgacaaatgctgggcatggagccgaaacagattgcgcgcgtggtacgccagcaggaggcgttatttagctcggtttatgaagggctgatcgccgttgatccggagggacatatcaccgcgattaaccgcaatgcgagaaaaatgttggggctgccgtcgccggggcgtcagtggctgggcaagctgatagcggaagtcgtcaatccggcagacttttttacctgccagatcgcagaaagacgccaggacgtgatggccaacttcaatggcctgagcgtcatcgccaatcgtgaggctatccgttccggcgaggagctgctgggcgctattattagttttcgcagcaaagatgaaatcgcgacgttgaacgcgcagctaacccagattaaacagtatgttgagagcctgcgcacgctacgccatgagcacctgaactggatgtcgactctgaacggcctgctgcaaatgaaagagtatgatcgggtcagagagatggtgcagggtgagtcgcaggcgcagcagcaacttattgatagtttacgcggcgccttcgccgatcgtcaggtggccggtttgctgtttggcaaagttcagcgcgcgcgtgaactggggctcaagatggtgattgttcccggcagccagctacatcaactgccggaggggctggatagcacggagttcgccgccatcgtcgggaatctgctggataacgcgtttgaggcgagtttacgtacacaggaaggcgacaagaccatcgaacttttcctgagcgacgagggcgacgaggtggtaatagaggtcgccgaccagggctgcggcgttcctgaagcgctgcgggaaaaaatttttgaacagggcgtaagtacccgaaccgacgaacccggtgagcatggtatcgggttatatctgattgcaagttatgtggggcgctgtggcggggtcattacgctggaagacaatgatccttgtggcaccttattttctttattccttccgaaagtgaaaaaaaacgatgacagaaccattaaccctattgatcgttgaggatgaaacgctgctggcggagatgcacgcagaatatatccgccatattcctagctttaaccagatatggctggcgggcaatctggcgcaggcgagaatgatgattgaccggttcaaacctggattaattctgttggataattatctgccggatgggaaggggattacgctgctgcatgaattaatgcagtcgcgctatcccggcggcgtcgtgtttacgaccgccgccagtgacatggagacggtagcggaagcggtacgcagcggcgcgtttgattatctggtcaaacctattgcttatgagcgtttggggcagacgctgacccgctatcaacagcgcagacgtatgctggcgagcgcggatagcgcaagccagaagcagatagatgaaatgttcaacgcctatgcgcgcggcgaaccgaaaggggatttgccgaccggtattgatgccttaacccttaatgcggtgatgaggctgtttgccgatccaaccgtacgccatacggctgaaacggtcgcgcaggccttaacgataagccgcaccacatcccgacgctacctggaatattgcgcgagtcagcatctgattgtcgcagagattattcatggcaaagtgggcaggccgcagcgtatttaccacggcggctaagcctggtttaagatgccggggcgatgttttccctcgccccggcttaccggctatcagccgccagtaacgctggaagaggcgcctggcaccataatttccgtggcgataatgacgatcaacagaccgacgataaccggaacggacgtgcgcttcaccacttcaaacggtgatattttagccatcccggcgacagcgaccacgacgccggagaccggcgaaatcgtgcgccccaggtttgaggcttgcagcattgggatggataaataggctgggttgataccggaggagtgcgccagtttagggatcatctcaacaaaggcgtaaaaaggcgcattgcctgaaccggtggtcatcgcggccagcatggttaaaatcactaagaccagcatcagaataatgctggcggagccaaaagaagtggcaatcgagatcagactttggataaagccaatggtgctcagcccctgggcgaaaacgcccgccgcgaccaacagcatcacaacgccggcaaacgcatccgccatgccgcgataagccacttccaggccggaaaacacattttgcgtgttgaaaccgcgcacgaattccagcacggcggccagcagcatacagatcaccagaatggtaataatgtgcaactgcggcccccatttaccgtcaaaaatcagtacgccgataatgggcgtgaacggcaaaagggcataaaacgccggggccgtggtggtaatctccgccacgtccagcatctcatgtgaaatgttctcttttttatccagatagcgttgccagaaaaagtgcgcaatcgccataccgataatggcggcgatggaaattggcagcgtagttttgaacgcgaaatcgattaacggcatctccgccgcttttgcggctaaaaccacatcgccagacgttggcgagaggatgatggcggccggagaggcgcaaatagccgccgccgcgccgcggctaatgccgacgttgaccatcaccgggaagagagtagccatgagcagtacgccaagccccgtcgcggaagagacggccagcgacatcaggcaggcgacaaaataggcggcaatcatcaacaggtagggcgagtttatgtactgtaaaggtttcgacgccagcttcacgaccatatcattcgcgccgatatgcgtcatataggcggcaaagccgcacagcatcatgatcatcatgccaagatcgccgccgcgactcataagcaaaattttgatgtattcaacaatatctgttgcggtatagccggtactggtttcgctggcaggtaataccttatgccccatcagcgcgctgataataagcagagccagaccgccgacaaataaaacgccagtggcggaatatcccttaatgatgtagcgcgctacacccacaataacgacgactccgataaggagctctataactgttagcattgtttcccctgtcttatcgacacccagagtaaaaataagaaccacaaaagtggtataaaaatgtaccgaataaaggatggcgccttactgattaaaatcacggcgcggttattttttcatgtcattgctaaagatgaaatatacttatacgaattttctgtagcactataagtattaatttattgttattttattgttttatttgttgtgctttgttttgtgttttttgtgaaagcttattaaggagcgcgtgacggttctgagtgctaaatcaaacgccgttaacccgatactctctcagattattctctgtttatagtttgttaagattttattcaggttaatgttgttattatcacagtcgaatttttgaacggtatgtatgttgcgatgatcatcagaaagtattttcttattattgctctccttttgatgccatggctggctattccttcagtctctgcggcggataaaggggggtttaacacgtttaccgataacgtcgcagaaacgtggcgacagcctgagcattatgatttgtatgtccccgccattacctggcatgcgcgctttgcctacgataaagagaaaacggatcgctataacgagcggccgtggggcgttggttttggtcagtcccgctgggacgacaaaggcaactggcatggcctctatatgatggcctttaaagattcatttaacaaatgggaacccataggcggttatggctgggaaaaaacctggcgaccgctggaagacgataattttcgccttggactgggctttaccgcaggcgttaccgcgcgcgacaactggaattatattcccatccctgtgctgttgcctttagcgtcgataggctatggtcccgctacctttcagatgacctacattccgggttcgtataacaacggaaacgtctatttcgcctggatgcgtttccagttttgatggggaagggtatgcttcagttgtgaattaaaaagtcttaaaaaacaataagtagatagagttagctaaaaattaacgcgatatttatcactttttcgcaaagttcgactggacaaaatgcatcacaattgttgtactggtatccgacacagcatttgtgtctatttttcatgtaaaggtaattttgatgtctaagattaaaggtaacgttaagtggtttaatgaatccaaaggattcggtttcattactccggaagatggcagcaaagacgtgtttgtacacttctctgcaatccagaccaatggttttaaaactctggctgaaggtcagcgcgtagagttcgaaatcactaacggtgccaaaggcccttccgctgcaaacgtaactgctctgtaagcatacgtccgacagcaagatttcaaaacccgccctttcggcgggttttttttgcgcttaacgcgccgctgcggcggaaaatagccagaatgccagcgccgtcatggcaaacgaacctaacaggttaatcagcacattcagcagcgcccagccaaagcgcccctcttgcagcaagaataccacttcggcagaaaaagtagaaaaggtcgtcaggccgccgcaaaagccggttgtgatgagcactttccacatcggatcgatatgtgtcatgcggttaaaccaggcgaaccccatgccgataataaacgcgccaagcaaatttgctgttagcgtaccgatgggaatcgcctgatgaagcggattaaaacgcatactgagcatccaccgggctacgctccccgttccaccgccgataaaaactgctaaaagaagctgtaacactgccgaatcctttatttaattgctatacaagaggagtgtaacgccgaacacgcataattggcgagtcctgacagaggtgtgggaggggatatgttcgttgcagccgggcagtttgtggtgagttctgtatgggaagagaatgcgcaagtttgcgtttcgttaatggctcaggcggcgggccgcggcgtatcgcttctggtgttgcctgaggggatattagcgcgagatgacatcgaccttgacctgccgattcgcgccgcgcagccgctggatggcgcgtttatgacgcggcttctggaagaaagcgctcataataatatgacgacgatattcactatccttgtcccgtcaacgcctggacgggcggttaatatgctggtggcgctacgggcgggtcacattgtcgcgcgttacgcgaagctgcatctctatgatgcgttttcgatgcaagaatcccaaagtattgatgccggaaccgttatcgcgcctgtgctggacgtggagggggttaaggtggggcttatgacctgttatgacctgcgctttccggacatggcgctagcgctggctttacagggggctgacgtattggcgctgccgacgggctgggttcgcggcccgttgaaagagcagcagtggtcgacgctgctggcggcgagagcgctggataccaccagctatatgattgcggccggggagtgtggtaatcgtaatattggtcaaagtcgtattatcgatccgttgggggtaacgatagccgcggcagccgatcgtccggcgctgatcgtcgcggaaatattcagagaacgaatagaccaggtgcgggagcaacttcctcttttgcagcaacgacgatttgcgccaccgcaattattatgatgtttttttacgcaaagcttgattcaccttgttacagattgctattgtgtgcgcgcgtcgaaagaccgttaatattctcaggttaatccggcgcgttacgcagcctgtttttagtgaagaaggtatctatgggtgagattagtattaccaaactgctggtggttgccgcactggttgttctgctgtttggtaccaagaagttacgtacgctgggcggagacctgggcacggcgattaaaggattcaagaaagcaatgaacgatgaagacgcgggcgttaagaaagacgtcgacggtagcgttcaggctgaaaaactctcgcacaaagagtaattgcgcgatgcgcttgctccgcagagtaaaaaaaccggcgagttgccggttttttttgcctgaaatgtaagcgtctattacacgatcatttcacttccatgcctttggcctggagatcagcatggtacgaagaacgtacaaaggggccacaggcggcatgggtaaagcccatcgccagggcttccgctttcatctcgtcaaactcttccgggctgacataacgctgtaccggcaggtgatggcggcttggctgtagatactgaccaagcgtcagcatggtaacgccgtgacggcgtaagtcgcgcataacctcaatgatttccgcattggtttcgcctaagcccaccatcagacccgattttgtcggaatttccgggtgcgcttctttgaagcgttccagtaatttcagcgaccagttgtaatcggcgcccggacgaacctggcggtaaatacgcggcacgttttccaggttgtggttaaacacatccggcggcgtcgcgttaaggatatccagcgcgcgatccatacgtccacggaagtctggcaccagggtctctatttttatctccgggcttttggcacggatggcggtgatgcagtcagcaaaatgctgggcgccgccgtcacgcagatcgtcacggtcgacagaggtgatgaccacatagcgtagcgccatgtcggcgatcgtttgcgccagtttctgcggctcttccgcatccggcgcaacggggcggccatgggcgacatcacagaacggacagcggcgagtgcaaatggccccaaggatcataaacgtagcggtaccgtggttgaaacattcagccaggtttgggcaagatgcttcctcgcagacagaatgcaggccatttttgcgcattgcggctttgatgccctggatacgggtagaatccgccggaagttttattttcatccattccggtttacgtagtagagcgtcgcgctctgtgaccacatttttaaccgggataagagccatcttatcggcatcgcggtattttacaccgcgttccatcacaatgggtttactcatagcgtgcgtgttccagttgcgaataacgaaggaaagcgtttcaattcaagggaaagttgtatttatcaactatttttgaatttgtgacacgcagtatatcattgataagggccataaagcagcctgacagcccggcaaaatgtaaaatagttgttgttttgtgctgtttgcccatatcttccgtgacctgaatgcaacatttttgtcagaacgcctcacggatgatatcaatgacgttctccagcaccggatcgcgcagactcagtttattgtaatgcagcgagaactcgacctgttcactattcaccggcgcgtagggaaggcgctcaagcggccagcagcggctaaataagtcgtagaagcgggtgggcatcagtcccagcagatcgctgctggcgatcagcgaggcaatggtaaaaatattgtagctgctaaaactgatttgctgatcgggaaatgtctcctgcagtcgctggcgcagcagggaaagatgttgtccctccagcatcagaaaggtgtgatccgcgctgttcagtctctcttcagtaatggcgttcgccagacacgggtgatgctggcggcagacaatctcaagcgtatcgctaaacaggacgtgatgctggatgctccggttgttatagctatgggtattgataatgagatcggtctgaaactgactaagctggctttcggcatcgtctaccggaatgttgcgcagcaaaagctgaggataacgcggcctgatggcctggtaaataatcggcatcactagcgcgccgaccgaaggcgtcgtgccaattgtaatggtgcgttgcttatcatagctgcccgtaagatccagggcgccaagaatagattccagcccctggctgatgtattcgtgcagatgcgtagcatacgtcgtgggcgttacgccctggcctttgcgaataaacagcggatcgggaaatatagtccgtaatttttgaatggactggctaatggctgacggcgtcaggttaagaattttcgctgcattgacgatccctttatggacatatacggcctcgaaaatcgtcaacagattgaggtcaatatttctcagtgttctgaaaatttgcggtttgtcctgtaggtgttgatcggccggttgtctttctgcctgattattatcactcacgctctggctccgaattcattcgtattatgaataatagatgaaatagtatattttgcatttatgggttggttttaaaattactcttatgaatgtatttttagtcatttcaataagataagtaacagcaaggccgggattttgttcacggaaaattcctcatcatgaggactgaagaggccatgccgcctggcggctacagcagggatataacgaaaatatagaaagcgggggagaagtaaagcattcaaatcatatatgattaatgacccataaatttcttgggccattatattttacgcattaagcagcaatatattcatacggtggattatttagcagagctaaaatattcgccagcaagcggggcgcaatattatccgtggtagcatcttccttccactgcgttattttggccatttccatgccggcataaccacacgggttgatacgcaggaaaggagaaagatccatgttaacgtttagcgctaaaccgtggaatgagcagccgcgacggatacgtaaacccagcgagcagattttcttttcacccacgtagacgcccggcgcatcggcgcgcggatgcgcctcaataccaatttcagccagcgtattcaccacggtctgttcaagtagggtgactaaatcacgcacgcccagtttacgtcgtttcaggttaagtaaaacgtacattacctgttggcccggaccatgataggtcacctgtcctccacgatcgctctgcacaacgggaatatcgccaggcatcaatatatgttccgctttaccggcctggccctgggtaaacaccgggtaatgctcaaccaaccagatttcatcatggctgttttcatcgcgcatatcggtaaagttatgcatggcctgagagatagcttcatagggctgaaggccgagctggcggacaaggattttatcctgatacaaaacggcatctccgtagagaatgaaaaaagagaggaaagtatatcacagcgggggaggcggggagttacccggataagaccgggtaaccgtctggatgtattacaataccattcgcacgatatcaatattgcccagttcttcgtacagcgtttcaacctgttcaatatgggtggcattaatggtgatagagaccgagtggtagttgcctttgctgctcggttttaccgtcggagagtaatcaccaggcgcatggcgctgtaccacttcaaccacctgatcaaccagctcaggtaacgcctgccccattactttgtaagtaaatggcgtagggaattcaagcagttcgttaagtttggttttcatgtcagctccggcattacgtaaaaaaaataacaactcccgccacagggcgggagttttactgatgcatagtatatggggacgaaaatcacactttcaagcgttcaatttttatccaaaccagtgatggaacattaatttaatgtaatcaatgattttaccgaagaagttcccttccgggatctcttgcagtacgaccagcggacgctgctcgatggttttaccgtccagctggaagttgatggtgccgaccacctggtttttctgcagcggcgcgtgcagttctgcggtattcagtacatagctcgctttcaaatctttcatgcgaccgcgagggatcgtcaggtaaacgtctttatcgacgcccagcgaggcgcgatcggtattaccaaaccaggcgggttcagaggcgaactctttaccagccttcagcggattaacggtttcaaagaaacggaagccccacgtcagcagttttttgctttctgtttcacggcctttataggtccgtccgcccatcacggcggaaatcaatcgcatctggccttcggttgcggaagcgaccagattatagcccgctttgctggtatggccggttttgatgccgtccacattcaggctgttatcccacagcagaccgttacggtttaactggcgaatgccgttaaaggtgaactctttttctttataaacggcatattcgttcggcacatcgcgaattaacgcctgaccaatcagcgccatatcgcgagctgaactgtattgtccgtcggcgtccaggccgtgtacggtctggaagtgggtatttttcagccccaacgcgttcacatagctgttcatcagcccgacgaaagcatcctggctaccggcggcgaaatcagccatcgccacacaggcgtcattgccggattgcagattgatgccgcgtatcaactgagagaccggtacctgcattcccggcttgaggaacatcagcgaggagcctttaaataccggattgccggtggcccaggcgtcattaccgacggtaaccaggtcggtttctttaaatttacccgctttcattgcctgtccgatgacgtaactggtcatcatcttcgtcagactagccgggtcgcgacgttcgtcggcgttttgttccgccagaactttgccggagttgtagtcgatcaggatgtaggattccgcatcgatctgcggaacgcccgggatcatagttttgatattcaggtcatcggcatgtgcggttgagataaacgcggcacaaagcgccgtggtgagcgccatgcgctgcataaaacgagcggaaaaagtggtcttcatggtctgaactacgacgtccgtgatgaaattaaaaaaagagccctactatagcaaaagcataactggcaggcatctgactttccgcgtgactttgttaatgtcatttacagaaattgacagtacagatacctgcgatcggttactgcgcgctggcgataaaggactgtaattgtgcttctgtttgcaaacgttgctgtaacgcgctggcttcggctttactggcaaaaggccccagttgaatacgccagaccgcgccgttttgtattacgcgtcctggtacgctgaactgctggcttaaacgctgttggtattgctgcgcacgcgtttgatcgctgacggcgccgacctggacgacgaaacgaccgctcgccgcggcggctggcgcactcaccggggcagataccggggccgcggcagcaggcgcgcttaccggcgtcgcagtcgctggagccgtcgctggagccgccaccggcgcggaaaccggcgctggctgtggcgccggcgtcggttcattactctccagcacgccaggcgccagcgtagtcggcgcgccgaggaagccgctgctgctcaccggcgcaccggtggtatcgtcacttttcaacgtggaattactgaccggaagaacgtcgccttgcggttgtgcaggtgctgaagaggcgcttcccattccgccgcttaaatcagggcgcgggggcagagcgtaggtctgtttcgccaccgtcgtacaggccatccccgggccggagagcgaaccatccggcgccacgataatggggtcaatccgtactttagtattattcgaggtattcagacgatccgccgctgcgcgggacagggagatgacccgatcggtgccataggggccgcgatcgttaatacgcacgacgatcatgcgaccgttggccaggttggtgattcgcgcatagctggggataggcagtgtcggatgggcggcggtaagctgcatcggatcgaacatctccccggaggcggttaaattactgccgggttccgcatcataaatagcggccaggccagcctggctaaagcgggacgggtcctgaacgattttataacttttaccgtcacgctgataatcctggtttgcggtcggattcagaggttcataacgcggttccgctccgctgatttccacagtcggaccattacataccgcaggttgcggcgcgacggtggtttgctgctgaccgccgtcattagtacatgccgcgagtagtactatccctgccgcgacgcagattacaggcaactgcttacgcattgcgcaccccttatacgcttttcgacaacatttttctgtgggtgtggatcgacatcacaatcccgaacccggccatcagcacaatcagtgcggagcccccgtagctgaccaggggtaaaggtactccaaccacaggcagaataccgctcaccataccaatatttacgaagacataaacgaataatattaacattaatccgccagccatcacgcgaccaaatgtagtttgcgctctggcggcaatccacaagccgcgcattattagcaaaatatagagcgcgagcagaatcaggatgcccaccagaccgagctcttccgccagtaccgcgaagataaagtcggtatggcgttcgggtaaaaactccagctgcgactgggtgccgtggagccagcctttaccgcgcaggccgcctgagccaatggcgattttagactgaataatatgatagcccgcgcccagcggatcggtctccggatcaaggagcatcatgacgcgctggcgttggtaatcgtgcatcaggaaaaaccacaaaataggaataaatgcagcgatcaatacaatggcgaccccaattaagcgccagctcagaccagacaaaaataggacaaagagaccggaaagggcgaccagaatagacgtccccaggtccggctgggcggcgaccagcagggtaggcataaagattaataccagggcgatggcggtatttttcagcgagggcgggcagacgtcgcggttaataaagcgggcgaccatcagcggcacggcgattttggctatttccgaaggctgaaagcgaacgattcccagatcgagccagcgctgcgcgcctttggatattgcgccgaaggcatcaacggcgaccagcaaaatgatacaaatgatatagagatagggcgcccagccttcatacacgcgcggcgggatctgcgccatcaccaccatgaccaccagccccatcgcaatctgaccgattttacgctccatcatgccgatgtcctggccgctggcgctccagatgaccaacgcgctataaaccagtaacgccagcagaatgagtagcatcgtgggatcgatatgaattttatcccagaaggtttttttgttcggattatccgtcatgattattggtcctccgccgctgcaaccaccgggttttccgcaggcaaatgggtgttgttgtcgcccagcatgatgtgatcaaggatttggcgcatgatcgtgcctactgccgggcctgcgccgccgttttcaaggatgatcgcgacggcgacctgaggattgttatacggcgcaaaggcggtcatcaatttatggtcgcgcaggcgctcggcgattttatgcgcattgtacgtttcgttggccttcaggccaaagacctgcgcggtgcccgacttcgccgcgattttatagggcgcgctggcaaaatatttatgcgccgtgccgttagggcggttggcgacgccatacatgccatctttcgcaatttcccagtagccggagtgaatatcgcccaccggcggctcatgcggctgtacccacggcacctgtttaccgttttccgcggtgctcattaacaggtgcgggactttaactacaccgtcgttaataaggatcattagcgccttactcatctgaatcggcgtcgctgtccagtaaccctggccgatgcccaccggaatcgtatcgccctgataccacggttttttaaagcgtttctgtttccactcgcgggtcggcatattaccagagcgctcttctgcgagatcaattccggtgtagtgaccatagccgaacttacccatccattctgacaggcgatcgatccccatatcataggcaacctgatagaagaaggtatccgccgactcttcaagggatttggtgatattcagatgcccgtggccccattttttccagtcgcggtagcgtttctcagaccccggcaactgccaccagccagggtcgaaaagactggtgttacgggtgatgacgccagcgcttaacgccgatacggcgacgtaaggcttaacggtagaagcaggtgggtagacaccctgagtcgcgcggttcactaatggcgtgttcgggtcgttaagcagcccggaataatctttgctggagatgccatccacgaaaaggttagggtcgtaacttggcatggagaccagcgatagcacgccgccggtacgtggatcggtgacaatcaccgccgcgcgactgcctgccagcagcgtttcaatatactgctggagcttgagatccagcgtcaggtagatatcgtgtccggcctgcggcggcacctctttgagttggcgaataacgcgaccgcggttgttgacttcaacctcttcataaccggtttgcccatgcagaatatcttcatagtagcgctcaatgcccagcttgccgatgtcatgggtggcggcgtagttcgccagtttgttttctctgtcgagacgctcgacgtctttatcattgattttcgatacgtagccgataacgtgggtcagcgccgatccgtatggataatagcggcgtttatagcctttgacttcgacgcccggaaaacggtactggttgacagcaaagcgcgcgacctgaacttccgtcaggtttgttttcaccggaatagaagtaaagcgatgggatcgggcgcgctcttttttaaaggcggcgatatcgtcgtcgtttaaatcgaccacactgcgtagcgcatccagcgtttgctgaacgttatccaccttttccggcatcatttcaatctgatagatagtgcggttcagcgcaaggggaatgccgttacggtcgtagattatcccgcggcttggcgcaattggcaccagcttgatacggttttcgttcgagcgggtctggtaatcggtaaaacgaaggatttgcagattatacaaattggcgatcagtacgccggtcagcagcaaaatacccaaaaaggcgaccagcgcccgacgcacaaacagtgcggactcagccgtatagtcacgaaaagaattttgtcgtttcatccgctgcttaatcttctcaagacttcacgatcactcacggtgataagggtggttggttgtgatgctccacgcccggtacaaactctccgcaaccagaacccgaaccagcgggtgagggagcgttaacgccgagagcgaccagctctgttccgctgccgctttgcaggcgggagataatccttccgggccgccaatcagcaaactgacgtcgcgcccgtcctgtttccagcgctccagctcattggctaactgcggcgtatcccacggcttgcctggaatatccagggtaacaatgcgattcttaccggcggcggccagcatctgctcgccctctttgtcgagaatgcgtttgatatccgcgttcttgccgcgtttgcccgcagggatttcgatcagctcaaagggcatatctttcggaaaacgacgcagatattccgtaaatcccgtttgaacccagtcgggcatcttcgtgccgacagcgacaagttgcagcttcacgcattaactccagagtttttccagttcatacaggcggcgactttcttcctgcatgacatgcacaatcacatcgcccagatcgacgacaatccagtcagccgcattttcgccttcgacgcccaatggcagcataccggccgcgcgcgacgactgcaccacgtggtcggcaatagacataacgtgacggctggaggtgccggtacaaataatcatacagtcggtgatactggatttaccctgaacatctaaggcgatgatgtcctgacctttcaggtcatcaattttgtcgataacaaaatcctggagtgctttaccctgcaagttttccccctgggtgaataattgcgttataacgatagaaaaaaggccaacaggctggaccggtaaggcgttgcgagttaacgctaaccttccggcgggacgccgtgtagtatacctgaatcagcggcgataccgggacttatgtcgccggatcggcgtttaaaaccagattatcatcccatcccacgtcacagaaagcatcgccatttttgtaaaacaatttctgcaaagctctgcaaggtgaaaaaagcctggctgcggagaataacagcctgtcgggggctgtcaatgggcgaaaccgctgcggcgagaaaaaacggaaaattcatcactcaggccgccagacggcacgactatttaatactttcagggtggcgaacccttcgcatatgtcgattgcgctccagcatccctgttctacccggaaatgccatagcgaggcggcgggcattgtgagcagacgggcaatcaacaggctgagtacgccctgatggctgacgatcagcaggttctggcaatcgctaaacgcgtcgagtcgcgagataaagcgctctacgcgccgggtaaaagcctgaaaaccctcgccattggtcggaaccgcattctgccagtccgtacaccaggcggcatagctttcggcatcttcatgggtgaggtcgcggtgatggcgcatttcccagtcgccaaagtacatctcattaagctcaggtaagatgtgttgcggcacatcccggccctccagtacgagccgggcggtatggcgcgcgcgctccagctcgctgcataacacccggtcaaatggcgcgtggcgcaataaagtatgtagcgttttcgcctggccaatccctttttccgttaacggcgtgggagcatgtccgctatacaacccggcgacattggcctcggtttcgccatgacgcaccagccacaatcgcatggtattcctcatgaggttaaatgcgcaaaacatgataatgcccctgattgcgcaacgtttttttcactaaaatagcgttttttggctggaggcataatggcgttattcaacagcgcgcatggcggtaatattcgggaagccgcgacggtgttgggcatctcgcctgaccagttactggattttagcgcaaacattaatccgctgggtatgcctgtcagcgtgaaacgcgcgcttatcgacaatctggactgcattgagcgctacccggacgccgattattttcatttgcaccaggcgctggcgcgtcatcatcaggtgccggcatcgtggatactggcgggaaatggcgagacggagtcaatctttaccgtggcgagcggtcttaaaccgcgtcgtgcaatgattgtcacgccaggtttcgcggagtatggccgggcgctggcgcaaagtggctgtgaaattcgtcgctggtctctacgcgaagcggatggctggcagcttaccgatgccattcttgaggcgttgacgcccgatctggactgcctgtttctgtgtacgcctaataatcctaccggcctgctgccggagcggccgttattacaggccattgccgatcgctgcaaatcgctgaacattaacctgatcctggatgaagcgtttatcgattttattccgcatgagacgggctttattcctgctcttaaagataatccgcatatctgggtgctgcgttcgctgaccaaattttatgccattcccggcctgcggttgggatatctcgtcaatagcgatgacgcggcgatggcgcggatgcgtcgccaacaaatgccgtggtcggttaacgcgctggcggcgcttgccggtgaggtagcgttacaggatagcgcctggcaacaggcgacctggcattggttacgggaggagggcgcccggttttatcaggcgctttgtcagctccccctgctgacggtttatcccgggcgggcaaactatctgttgttacgctgtgagcgagaggatattgatctgcagcgacggttgctgacgcagcggattttaatccgtagctgcgctaactacccggggctggacagccgctattatcgtgtggcgatacgcagcgctgcgcaaaacgagcgtctgctggcggcgctgcgcaatgtgcttaccggtatagcccctgctgattgatgtagttcagcacgttttccggcaacagatcgtcgcaggattcgcctttttccagccgttcgcggatgagggttgcggagatattaagccagggcgtttccgccaggtaaattttaccggctggcaactggtgcagatcgtccggcgtatgggtcagatgctgttccagccactgctggtgttgcgcctgcgtcatttcaagggggtagccgggacgacgacaaacgatcaggtgagtgttatcaaggatggtgtcgtaatcatgccaggtggggaagttaagcagcgagtcctggccgataataaacgccagcggcgcttcggggccctgttcttcgcgccatgctttcagcgtttgcgcagtgtaagagggcgcgtttcgctgtagctcgcgttcatccagcgtaaaaagcggcttatcggcgatagccagctccagcatatatttacgctgcgcgctggaggcttccggctgggggcgatgcggcggcacattgttaggcataataatcacccgcgataagccgatcagattcgccagcgtttcaacaggtttaagatgtccataatgcaccggatcaaaggtgccgccgaataaagcctgtaacgatttcatatcacccatcaataaatacgtctgccagcgccttatggcagagcaggagcgacagcccttcaagatctgcccataccgactgaccataatcctgtttgagcgtaatttctgtacgcgtcagtaactgcacggcctggcgaagctgcgcaggatggagacgctgcaacgcgtcgccgatcatggggcgacggttttgccagacccggtgtttatcaaacagcgcgcgtaacggcgtatgcgcggactgacgtttgagatttaccagtagcagcagctctcgctggagggtgcgcagcagaataaccggttcgctgccttcaaggcgtagctgttgcagaatgtgcagcgcgcgtttgcttttccccatcagtaacgcatccacccagtggaaaggggtaaagtgggcggcgtcattgacggcctgctccacgcgaggaagcgttaacttaccgtcaggccaaagcagcgacagtcgttccagcgcctgcgccagcgccaacagattgccctcatagcaatagcacagcagttggttcgcggcgtcatccagttgcaaattctgtgctttcgctctggcggccacccagcggggaagctgcgcctgctccggcgtctgacaactgacctgaacgctacggtctgccagcgcggtataccaggctgcgttttcctgcgctttggtgagcttgtttccgcgtactattaataacaggtcgtcatgcagcagctcgctcagggtggcgagttgctcattcattgccgcgttaggcccgttttccggcagttgcagcaccagcgtttgacggctggcgaacagactcatcgcctggcagagtgagaaaagcgatccccagtcggtactgggatcgagagtaaaagcgtggtgctcttcgaagccttgcgacgcagccgccagacgaatagcgtcctgactttcctgcagcagcagcggatcgttgcccaatagcagatatgccgcacgcagcccttcattgagctgcgcgcggagttgttcaggatacaacctgatcattagttactcagcgtagtggagacgcgtgctggcgtagaggcgggcgccgccgtctcattgtcggcggtagcctcctctttcgtcgcctgaatatccgccgcgcggacgctggtcagcttacgaatcagctgttcagcggctttgtcgtacatctcctgaacgatcatggcctgctcgttatccttcgccaacgccatctgcgggttatcgaagaacgaacggtacactttcgtgctgataggatagatgtcatggcccggaatcaataccgaggcattgacggtcatcaccatctgatattccgccgtctggccgtcctggaacactgacgccgtatcctgcaaaatagtcaccgttccaagccgcagagacggaacgtctttgcgcgttgtgtctttatcaagcaggtttacgttattcagccgtaactgattacgtaccgcacgacttagcggaccgttcggatcgccggaatcgaggatcatcgttttcattgaagccggaacctgcgtagtgctacgcagatgccagccgcatccggcggtgaccagcaccgccagagataacaacagtgttaccagatatcgcacgcttcctcccgcgcttagccaacaaccagattgaggagtttacccggaacgtaaatcactttacgcacggtaacgccatcaagatattttgccaccagatgttcctggcctgcacgttcacgcacctgttcttcggtagcatccaccggtacggtgattttcccgcgaactttaccgttaacctgcacgacaaccagcgtggtgttttccaccattgcctgctcgtcggctaccggccacggcgcgttgtcgatatcaccttcgccgcccagctcctgccacaaggtaaagcagacgtgcggcgtgaacgggttaagcatacgcacgacggcctgcagcgcttcctgaagcagtgcgcggtcttgttcgccttcctgcggggctttcgccagtttgttcatcaactccatgatcgccgcaatggcggtgttgaacgtctgacggcggccgatatcatcggtcactttggcaatggttttatgcacatcgcgacgcagcgctttttgatcttcgctcagcgcatcgacgttcagcgccgcgacaggacctttagcggtgtgttcgtaaaccagcttccagacgcgtttaataaagcggtttgcgccttctacgccggactcctgccattccagagtcatatccgccggagaagcgaacatcataaacaggcgtaccgtgtccgcgccataacgttcaaccattacctgcgggtcgataccgttatttttcgacttggacattttactcatgccagtgtagaccagctcatgacccgctgcgtcttttgctttgacaatgcggcctttttcatcgcgctcgacgatagcgtcaactggcgaaacccagttacgttcgccgttctcgccgacataatagaacgcatccgccagtaccatgccctggcacagcaactgtttagccggctcgtcagaggtgaccatgcccgcatcgcgcatcagcttatggaagaagcggaagtagagcaggtgcatgatggcatgttcaataccgccgatgtagatgtcgaccggcagccagtagtttgccgctttcgaatccagcattccttcctgatactgcgggcaggtgtaacgcgcgtagtaccatgacgattccataaaggtgtcgaaggtgtcggtttcacgcagcgccggcataccgttaacggtggttttcgcccactcaggatcggctttaatcgggctggtgatgccgtccatgacgacatcttccggcagaataaccggcagttgatcttccggcgtcggcagcacggtgccgtcttccagggtgaccatcgggatcggcgcgccccagtaacgctgacgggaaacgccccagtcacgcagacgatagttcactttacgttcgccgacgcctttttccgccagtttatcggcaatggcgttaaacgccgcttcaaaggccaggccgtcgaactcgccggagttaaacagcacgcctttttcggtcagcgcctgttcggaaagatccggctcggaaccgtcggcggccagaatcaccggcttgatggtcaaaccgtatttggaggcaaattcgtagtcgcgctgatcgtgacccggaacggccatcaccgcgccagtgccgtactccatcaggacaaagtttgccgcccagaccgggatctcttcgccagttaacggatgaatcgctttatagccggtgtcgacgccttttttctccatggtcgccatttcggcttcggccactttggtgttacggcattcgtcgatgaacgccgccagttcggcgttgttcgccgccgctttttgcgccagcggatgaccggcggccaccgccaggtaagtggcgcccataaaggtatctggacgggtggtatagacggtcagggtgttatcgtaacccttcacatcgaaggtgatttccacgccttcagagcggccaatccagttgcgctgcatcgtttttacggtatcaggccagtggtccagcttatccagatcgcgcaacagctcgtctgcgtaagcggtgattttgataaaccactgtgggatctctttacgctcaactttggtgtcgcagcgccagcagcagccgtcgatcacctgttcgttggcgagaacggtctgatcgttcgggcaccagttaacggcagaagtcttcttgtacaccaggccttttttatacagctcggtgaagaacttctgttcccaacggtagtattccggggtgcaggtcgcgatttcacggctccagtcatagccaaaacccagcgtttttagctggtttttcatatacgcgatgttgtcgtacgtccacggcgccggcgcggtgttgttcttcaccgccgcgccttccgccggcaggccgaaggcgtcccagccgattggctgcagcacgtttttgcccagcatacgctggtagcgggcaaccacgtcgccgatggtgtagttacgtacgtggcccatgtgtagtcggccagaaggatagggaagcatcgacaggcagtaatacttctctttgctctcgtcttcggtcacttcaaatgtgcgcttctcatcccagtgaagctgtactttggattctatctcttccgggcggtattgctcttgcatggcagccagtagtcctgttttcgatacagctacaaatgtagctttagaggtggtgtttagatccgcatagcatagcccaaacacgcacgtcaaaacagggggtagaacatttgtcgcgccaggcgtccgtgaggaggtgacgcaaaatgcgacacgactgaggcaaattaccgcagttcctgtcaccgccagatcggcccataaaaataaagtcatataaaccatgtagttaaaaaatggcacgccttttgattagggaagacaggactaaagcaaaggagttaatcgtgaaaaaaaatgcagtggtgattcaccctcaggattgcgtcgcgacggctattacggcgctcaaggctggcgaaaccgccacaatgttcattggcgaacgcgagataagcgttgtgttacatcaggatgtgccatttggccacaaattcgccatctgcgatgtgccttttcatggcgaagtttataaatatggcgaatccattggccgcgccactcaggaaataaaaagtggcgactatgtgcacgtccacaatgtggaaagtgaacgcggacgtggtgactggaaataatataaaacaagggaaaatgattatgagcaatgagacttttttgggtttccgccgccctgacggccgttttggcatccgtaattatgtactgattttacctaccagcgtttgtgcgaataaagtcgcccaggatattgcccggcaggtaaaaggcgcgacatgggtgaataacgattttggctgctgccaggtggcaggagatgcgcgtctgacggaaaagacattgattaatgtggcgaataatcccaacgtcggcgctattgtggttgtgggcttaggctgtgaaggcgcggagccgctgcgcatcgcagaagagattaccgcatttggcaaaccgacctcctgcattaccattcaggaagagggcggcacgcttaaatgtcaggctcgggggatttcgctggcccgcgattatgcgcaacaactctccatgcaaaaaccgcagcaagcaccggttagcgagctgctgctggcgatggagtgcggcgggtcagatacgacatcggggctggcgtctaacccttcctgcggggtcgcctcggataagctgatacgctgcggcggaagctcaattctttctgaaacgacggaatttattggcgccgagcatgtgatggcgaaacgcgcggtgacgccggaggttggtcaacagcttattgatttagtggtcggctgcgaggcgcgagcaaaagcgctgggcgaggatattcgcgggggacagccgacgccgggcaatattaaaggcgggttgactaccattgaagaaaaatcgttaggctgtatgcataaagcgggtcatgcgccgttacagggcgtactggaatatgccgatagcccaacgcatccgggcctgtggattatggataccccggggcaggatattgaatctatttccggcatggtggcggggggagcgcagatcgttatttttactaccggtcgcggaacgcctgccggtaacccaatagcgccggtaataaaaattacgggtaataaagcaacgtgggaaatgatgcaggacaatattgatattgatgtgtccgccattatgtctggcgaggcttctattacgcaaatgggcgaggaaatttatcaggaaattttacgcgtcgcgaatgggaaaacgactaaatcagaagatttaggtcataacgaattctctatttataagatcgcgccgacgttctgataccaaatcgggcagcacaagctgtccggttatctcctgggaataagctatgaaaattaaaaaaacactggaacgttttcctggtggtatgatggttgtaccgctaatcatcggcgcattgtttaaaacttttgcgccggaggcgctggaaataggcggttttgtcacttctatttcgcatggcgcaatggcgattttaggcatgtttttagtctgtatgggcgcggatatccagtttaaagccgcgccgaaagcgctgaaaaaaggcgctgcgatcacctttgcgaaatttgccagcggcgtgattattggcattctggtcggaaaattttgcggcccggatgggttattaggtctgtcggctttagcgattatttcggcgatgaccaactcgaacagtgggttatatgccgcgttggtgggggagtacggcgatgaaaccgacggcggcgcgattgcggtaatatcgttgaacgatggtccctttttcaccatgctggcgttaggatcggcaggcatggtgtcgataccctttatgaatctggtggcggttattattcccattatcattggcatgattttgggtaatctggatgaggacatgcgcaagtttcttaaacagggcagcgtggtaacgattcccttttttgcctttgggttaggatacggtattgatttcgcaagacttatcacggcaggttcttcaggcattttactgggactcatgacggtggcgattggcggattttttaatattttcgccgatcgtctgacgggaggcagcggcgtggcaggcgcggcggtctccaccacctctggcaacgccgtcgcgacgccagcggcaatcgcgctgctcgatccgcattttaccgacctggcgtcgacggcggcggcgcaggtggcggcctcgacgattattaccgctctgtgcgcccccttcctgaccgtatggataaaaaaacgctacgatcgtaaactgaacccagccgccgcaggcggttagcgtttcggcggaaaataaatcacgacgggcggtctcgcccgttcataaaccaacaggatggtgagtgatgaataagacgaaagatatagccgcatctcctctctgttttgtctctccttaccctcaactggcaaaggctgccgaggcgctggtcgcgcagttggattacgccgtcactattcatcaaacgacgcttaatcgtatcctggatgagctacctttattagagtcccgtgggcaccaggtactgattagtcgtggcggatgtgcggaaatattaaaaaagcacagtaaattaccggtagtcgaaattaaaatgtccggctacgacattcttgatgcgcttatcccttttaaaggacaaaaaggcactgtcggtattgtcggcttttccagtgtgatcaaaggatgcgcgcgcgtagcggaacagttaaatattaactataaaatttttaccttacagggaaatgataaagaaacgatttcttgcctgaagcggcaattagcgtccacgccattagattgcattgttggcgataccgtttgtcaggattatttttcaccgctgggctcgcaattccgtttacttgattccagccccgcctcaataaccgaagctctggaagaagcccgctcattatatctggcttttcgcagccaattactcgagcgtcatcatctgcagctgattctcgatcagtttgataaagctgttatcacgcttgatgataccggcgcgttactgcattacaataaatatgcgagccaactttttaaaattaacgcctccggtgagatttatgacgcatctttcctgaaacaggtattgcaccaggagcggcatacattacgtgagggaaaaaccgtcagcgcgaaagtcgtcgatacgccgcaaggcgcgatggtagttaatctgtatccggtatttgcggccagacagttaagccgggtagtgttgacgatgcaaaccgtctccagtttacagggggcggaacatcatgttcgccgccaggaactgtctcgccgcggcttgagcgcccgctatcatttcgacgatctgcttaccgaaaacccggaaatgctgcgtcgtctggcgatcattaaaaattatgccggtacggacgcgactatcttaattaatggcgaaagcgggacgggaaaagaggtgctggcgcaaagtattcataatgccagccaacgcgtcaacggcccgtttgtcgccattaactgcggcgcgatggcccctcagattctggagagcgaactctttggctatgtcgccggcgcatttaccggcgcgtcgccgaaaggcaaaataggcctgtttgaattagcgcaccacggtaccatttttctggatgagattagcgagctggataaaccgctacagacgcgcttattacgggtattgcaggagcggcagattatgcggctgggctcagaccagatgatacctgttgatattcgcgtgattgcggcgaccaatcagacgttaacgaagctcattgcggacgggacatttcgcgaagatctttactatcggcttaacgtattaaaagtgaccaccatcccgctacgcaaacgtccggaggatatcaaagccatcggcctgtcgctgcttactagtttcagccagcattataaacgcccggcactaacgttaaccccggcgctgtggcaagagcttcagcgcttcgcctggcccggaaacgtcaggcagttaagcaatattatcgaacggctggtactctctattgatcactccccggcaacgctggatgagggtcgcctcttgctggacgatctggaagaggggagccgacgcgagccaactacctgccacgactgccagatgctggctggcgattataaaacgattcgcctgcgtattttgagaaaattattagaggcggaaagggataataaatcgttagtggcgaaacggttaaatgtcgatcgtacctcgctgacgcgctggatacgcgagtcggcctgacaagaatttacagactctgtgggcagccttgcaaagcgtaacgcaaataacgtctattattataggcagttaacgatccaagaggtgaagtgatgaacaaggttgctcaatattaccgtgaactggtggcctcattaagcgagcgtttacgcaatggcgagcgcgacattgatgcgctggtggagcaggcgcgccagcgcgtgatgcaaacaggggagttaacgcggaccgaggtggacgaactgacgcgcgctgtcagacgcgatctggaagagttcgccatgagctacgaagagagccaggacgatagcgtcttcttacgggtgattaaagagagtctctggcaggaattggcggacattaccgacaaaacccagctggaatggcgtgaagtcttccaggatttgaatcaccacggcgtgtatcacagtggcgaagtggtgggattggggaatctggtgtgcgagaaatgccactatcatctggcggtttacacgccggatgtgttgccgctctgcccgaagtgtggccacgatcagttccagcgcaggccgtttgagccgtaaggttcattatcgtgagcggacggttgccgtccgccatgttaagcgtgcagttgggcttccagtttgcggatctcttcatcgacgttccatttgcccgtgggctgtgcttttttgaaccagtagagcgcttgttgtaggtcttgtgcggtaccgtgtccatctctgtacatgcatccgaggttgtaccagcccgatgaattgttacattctgctgatttgtggaaccattccagtgctagcgaataattttgctcgacgccatgaccgcatttgtacatccagccgatactgttataggcatcatcgtcaccctggtctgccgcttttcgaaaccagtatattgcctgctggtaatcttgtttgataccttttccgatgtaataacaatagcccatctgatattgcgagtagctgctctcttgtagcgcgctcttcttgtaccaaagggcggcaagggataaatttttccgacatcctttcccattgccatacatatacgccagtctttcctggctggcgcaatggccttgtaatgctgcctgtttaaaccagtagagtgcctgtgtatcattttgctctacgccagttcctgaatgatacattctcccgagattatattgcgcaaggttgtggctctgttctgctcctttgcgataccaggcaacggcctgggcataatctggcgccatcccggtttctccttcctgaacccagcctaatgtgttgaaagcgtggcggtgtccttgctgtgcggctttttctgaccagaataaagccagcgtattatctttcatgtcggtaggcgtgtctttgtatcgtaagccgagccaatattgtgcctcgcagtgtccttgttcagctgcctgctgcaaccaataaaaagagagcttatcctcttcgctgccatctatacgttcgtcattatataaacggcctaatatatattgagcttcactatttcctgactgcgccagttcggttaattgtgctaaagatacgttgtcgcagggatgactggttatggaatgattcattttttaatttatcccgccattgttttttagattaataatatattgcgatttggctttgttgtactctattttagttttcaattgcgtttttatttgtggtgtgaatatattttggcgatttattatggataaagaatcacaatatttactctttgcactttcctcgccgatggaagtattgaacgaggactgtttaccttcacattcgtcaccgaaaatgtatttaggtgtaaaacgtttcgatcttgaatcgtcgtggggtattgaaaatcgcgatgaactgcttcagaccatttcccgcaggacggatgacggtcatgccacacaactggaatggctatatcgccgctggtttaggtatgcgccgcaggagtggcaggagtataccgacgcgctggacgagggagatcgcatttatgcccgattcgtcgctgataccgccgtgtgttgcggcgaaggtggtattcgcagttgggattatgtgcggatgggatttctctgccgcatgggcgtgctcaatgaatggctgacggaagaggagagcctgtggctgcagtcgcggatacagcttcgcgcgctcagctattattccggctggttgccgtacttcagcgcttattacaccgggcgtttgtactggcagttacggaatggcgataacctaccgctgctacgcgagacattcgcccgtaaggagtttgatgacgcggggcgacgtatgatgaataaactgatcgccgggaaggacagtttttacgccacgctgccgtggcgctacctgccccattaccctgaatgcccggacacgcttcaggaggtgagcgatctatgaaaacctgttggcaagtccttggcattgaggccaccacggataccgacgccattcgtcaggcttatctggcgctgctgccgtcatttcatccggaaaccgatccgcagggttttaagcaattgcgagaagcctatgagaatgcattgcaggggacaacatcgcccgccattacggtggttgatgaggatcccgataccccgtgggtgaattatctcagggagatattcggtgatttgctggcggatggcgaacggcgctttcagccgcaggcatggcaggagtttatccaacagatcaataaattatcgatttcacaggtcgaaaaatcgcgctggtggctgtgcgctatcgcgatgaagacctttcctatttcgtactcgtgtctgaaactgctgtcagatcgcctggcctgggaacaggggagtgataatcgagatgtcgatgccgaggaggtggaggatcttttgtttgaaatccgccgtggcgacctgtttgattattcgctattgctgcatttgccagtggcggtacaaaaccagaccattgctttttatgatgccctggacaacacctttttcgagcatcctctctatttcgcccaacttatggcccagcacggcccgtggattatcccggacaatctacgctttcaacgacgtctgttacgctggttcagcaccttgcactggggtattgcggagctgctgcctgtcgccctggcatggcaggaagccgaacccgataacgcaacgccgggttattactacttagcccagcgcgtattttgcggtgaaggcgatagcctgctgccagaactttacgcgcagtggtgggcgcatccttctacccagcttgacgatctgttgctgcgctggtgccgtcagcatcgaccggactttttcccgctgctggtgatggcggttgaggggcgtgagcaggtggatattaacgctgaacagctgctgtatattcccggctcaagcgctcgttcctgcttgctgtgggccgaggcgctgcacagcggcgcattatcgccgctaagcgaaagttttattgcgcggcgtttgaattatggcgcgccagcggtgagtgaggcgcatagccagcatccatactggctgttgtatcaggtggcggatagcctggcgtgcgccgaggagccgtcagcggcattgttacagagtctggtaacgaagcttgatgcgccggatatctgcccgttggaagcgctggttattcgcgggttgctggggcgggctgcggctgtcgccacaccgtgtgaagctgtagtcgcagatgaagaaccggtgacgacggtgacttcgccgagtacggaggaatctggcggcggctttggcctctggcaggtgattaaaatcattttatttattggcgttgtcggccatgtattacgccagtttatgcattagggatatcgaatatggacaaggaagaacaatatttactttttgcgctctccacgccgatggaggtgctatatatcggcaatgagccttcgcatacctctccagcaatgtataccggaattcctgctgtcgatctctccgattcatggggggattgataaccgtgaagatcttattcaaaccatctatcggatgacggacgatggtcatgcggcagatttggctcccttttatatccgctggtttacgctatctcctcgtcaatggcgcgaatttaccgcgcagtttggcgagcagggccagatttatgcgcgatttgttgccgaaaccgcactatgctgcgggcgcggaggcattaaagcctgggactatgtgcgtatggggtttttatgccggatgggggtgttgaatcaatggctgacggaagaggaaagcctgtggctgcaatcgcgtatctatgcgcgggcgtactatttttacgacggttggacgcaatattttgccgcctattcgttgggtcggctgtactggcaggctaaaggggacaccatacaggcatatttcgctcacctaaagtacgacgcttcaggcgcgcggatgtttaatgaactggcctctacgacagagagttattatgcgcagctaccgtggcgtccgctcaacgaacaaccgacatgcccggaaacgcttaaaggagtgagcgatttatgaatatctgttgggaaatcctgggcattgaacctaccaccgatctggaatgtatccgtcaggcttatcttgccctgttgccctcattccaccctgagagcgatccgcagggttttaagcgattgcgccaggcctatgaagaagcgcagcactgggccgcctcgcctgcggaggacgcaaaaatggaagaggtgggcgacgaacatgaaatactggtggcgttcagggaattgctggcatcagagcgcgatcgctttcagccctcggcatggcagaaatttattcagcaattgaaccagtgttcaatggatgagatagataagctgcgctggcagttgtgcgacatcgccatgaaaacggaaacgatctcgctgtcttgcctggcattgttggcgcagcgtctgaactggcagccgcaggaagcagaagatgatgctgatggagaagagctggaagcatttctggagaccgtaaagcggggcgatgcgtttgatctgctaagtctggccaaattgcctcttgttgttcaagaccaaactgacgcctacttttttaagcttgagcatatctggcgcttttatcccgaacattttgccgacgctctacaggttcagggcgcctggataattcccgatgataaacagctgcatcgtaaactattacactggtttagcgccgagcagtggggcatggcggaactggtcgatattgctcgtcgctggcaggccgcggagccggataacgaagatgcgcactattacctgtgcaaacagcgtttgctctgcggtgaaggggaaagcctgttggccgacctttgcgatttctggcagcgttatccctccacgcaggcggacgacctgttgctgggctggtgccgccagcatcggcctgatttcttcccgctggcggtgatggcggtcgaagcgcgctgtatggcggatgccgaatatgtccccggtgaaagcgcgcgcacgcgtttactgtgggccgacattttgcacagcggtaggttatcaccgctggggcgttcatttgttgactccctgttttataagcgaaaagcgatggcgtgggcaaattcacggctgagtacccagggggaacccgaaacgccgctgttggatctgtaccggacggcggagcaggtggtgctggaagcgtttcccaaagaaaagcccttttttcgcctgctgatccggctggaggaggggcaatcctgtccgctggaggcgctgataacgcaggcattgtcatctaaaatcgccatgaagccaggcgatattcgtgacaaaaaggagctggcggaagagctcaggctggcggctgagaaagaagagacaaaattgtcttctgaagcgaaaaccgaagcaccccgtcaggcggaatctggcggggtgatgaaaatcatgaagattgtcggtttgatcgcgttgattgtctgcgcgttaaatcgattcttccattttttctgaacaggggtagtgaaagcgccgttacggcgctttcggctcgtcaatacccagatattcacaggcgcgacggcgtacgtcatcgacacgctgcatatcattagacagcagggccgcgtcgaaatcggtaataatctcccccagcatttcgcgctcatcgcctaacgcgcgtgaccactgctcctctaactgtgctttaaacgtccggttaatcagcatatcgcggggataaattttcagcgccagcagccgctcgcggctggcgtcgatttgctgcgtcgtcagtgaggtggcattgtgactgatgattctggattcactcttgccgtcttccagcagcacgtcaacttccagcagaccattaatatcgtagctaaaacgaatatcaatggcctgaatgtgcccgttcggcttcagcatgacgtcaaaagaatcaatcaggatattatttttcaccttatggctttcgccctggtataccctgacgcaaatagagtcctgctcagggtgcatggtggagtacgtttccacttttgacaccggaacggtggtattgcgttcaatgatgggcgagaaaataccaggcactccctgtcggttgacttccacgcccagcgagtaggggcagatatccgtgaggatcacctcttcaacgtcttcatggcgcaggcgacaggcggcctgagttgcggcgccaagcgccacgatggtgctgggatcgtaactttgatagggcaatttaccgaataagcgcaccgcgatgcgttgcaccagcggcatctgtgacgcgccgccgaccagcaccaggctgtcaatttgctccggtttgagtcgggagtcgcgcagcgcctgctcaatgggcgtgcgcagccggttgagcaacggtagccacagggcttccagctcatcgtcataaaacgtgctttccagaacgctctcctgataaagccagctcatgcgcagcggggagctgctggcgcattttgcggcttcaacacaggcatacagcgcagccagatcgctatccgtcagcgctgatttatcgaggttccagcgtttcagcacttcatcaagcaacaaatgcgtgaaatcttcgccgccgaggtagttatcgccagcggaggcgtgaacttcgataatcggcgtagcgtattccagaacggtcacatcaaaggttccgccccccagatcgaaaaccagcgaacggctattttgctgcgtatgcaggccataagccattgccgccgccgtgggttcattgatcaagcgcacggcgtttaaccccgcaagctcagcggcaaggcgtgtatgcttacgctgctcatcgctgaaataagccggaaccgagatcacgacatccttgattggctgctgaaggtagtcttccgcatcttctttcagcgagcgtaaaaccagcgaagataattccggcgcattaaacgactcttcacccaaatgccagtgagtattactgcccattgcgcgtttaaataaggcagcggttttatctggatgagatgttttacgggctgcggcaggttttcccaccagaatttgtttattttcatccatactaattatggatggtgttaaatattcaccaaatttattaggtattaattgtgcggctccgtcttgccagacggcgattaaactattagtggtgccgagatcgataccaatcgctaacgttgcattatccattgcgtttaatttatcgggaaagagagtttatagaataaagaacaccaccctctggcgtggtgatctttatcaatgtcacgcctggcgaaagtattcatccataatgttcgtcaactccgggcgctcgccgtcatcattgatggcgaaatcgaggaaaaaagcatcggcctgtggcgtgcgtttctgggccagtaaacgaaacgccagcgggtagtggcaagcataaccgggtgcgcgagtcagaaaacggacaaaatcaatcaacaagggagaatgggtataaaacagcgcgcgtaacagtacggcgggaaatccctcttcggtgatcccttgcgccatgattttgttgaggccggcttcgctcaaatcgcctgcggcaataatatctgcgcaggccgcaagatcgggataatgcgttgcgcagttagccaatgcgttcggccagttgacgcgggtataacgttcgtcatggcgagtaaagtaatcctcccaaagggatggcggtagtttttcgtactgtattttcagggggatgcggcgctgaaactgggcttcttccaggcgctcgccgtcataaaatcgcaggcattgctgtcgcgtctcgtagcatgtcatcgccaccggctggctgatgacccaggtcttcacgggccggccttccagcgcggcggcggtggctttatggtgaccatcaagcaggacgcaaagccagctgtcattcatataccaggccagcgcgtggctctctggcttatcgcgataatacccggcgcgttgtgggttaaatcgcgatgggggctggcctggcagtaaaaaacagggttcgccggactggtagtgatagtccacgtcagcaatccactgccctgtggtcgcgggattcggttgtttttcgttacccaccgcccagaaaaaatgtccgttgccatctgtgggataaagttcgcgttcctccagtcggtaatagccatcggcaaagagtgaaaacagcggcgtcagggcggtaaatgcttcgttcaacccgactcctggctgattccactcggcaagtgaggataaaaactccgcggcgccttcatcatcattgctaaaaccggcataaacaaattctgcgcaggtcgggcaccaggcttcagtgtaaaaacgaatcagcggcgagccatgccaggaaagcgtatgaataccggcgtcagagtcgggatcgtggataacgctgggacgaagcaatgcttttccgttacgtactgaaaacgtaatatgggctacatcgtgctgtagcaggctgatttcaggtctattgttacgccaaaacatcgctgttcatccctggattctactttgcgctttatgcgtagtattgcagccgttccgccagcaaatcgacaaatccctggcggtctacatcgaccatcaccgtcgcattcggcttattccccgtcaggaaataataatccaccaccgtcatcccctgggtgtatttcccctgggtttccacgccgacccaacgctcaacggtggtgaaaatctcgggcttgagcagccaggcgatggtgcacgggtcgtgcagcggtgcgccgacaaatccccatttttcgtctttgtggtactccataaagaagtccagcagttcggcgacgatggtggaaatcgggttaccgatggcgcgaaagcgttcgatatcggcggcgtgaatctgtgccttatgagtgacgtccagcccggccatcaccaccggaatgcctgactggaagacaatttctgccgcttccgggtcgacgtaaatattaaattccgcagcgggcgtccagttacccagcgccatcgcgccgcccatgatcacaatgcgggcgattttcgtatgcagttccggatggctattcagcagcagcgccacgttggtctgtgggccagtggagacgatggtgaccggttgtgcgctctcgcgcagcgtttttgccatcagctcaacggcagtgccgctttgcggggcgaatgacggctcgggcagcgccgggccgtcgaggccgctttcgccgtgaacgttatcggcgataatcagttcgcgcatgagaggtttcaccgcgccgcccgccaccggaatatccaggcgtttgagcagtgtcagcatccgcagcacgttgcgcagggtcttctccggcgtctggttaccggcggaagaggtgatcgctttcacttccagttcaggggaggcgagggcgagaacgagggcgatcgcgtcatcatgacccggatcgcaatcaataataatgggcagtgccattgtggctccttgtaagcggtactttgtgacaaggttaacgcccggctggatacgtttcgagaagcgaagaagtaaagcgtgagatagcgcgcactctgacgtgcgcgccgggaagattagtgcaggattttcgcaaggaagtcttttgcgcgatcggaactggggttagcgaagaactcctcttttggcgaatcttcgacgattttaccttcatccataaagatcacccggttagccactttacgggcaaagcccatttcgtgcgtcaccaccatcatggtcatcccttcgttcgccagctcgaccattacgtccagtacctcgttgatcatttccggatcgagcgctgaagttggttcatcgaataacatggcaatggggtccatacatagcgcgcgggcgatcgccacgcgttgttgctgaccgccggaaagctgcgccgggaacttgttggcatgtgcagacaggccaacgcgctccagcagcttcaggcctttatcgcgggcggcggccttatcgcgtttcagcactttcacctgcgccagcgtcaggttttcgatgatcgacaggtggggaaacagctcgaagtgctggaataccatgcccacgcgggaacgcagtttcgccagatcggtttttttgtcgttcacaataatgccgttaacggtaatttcgcctttttgcactggttccagaccgttgacggtcttaattagcgtggatttaccggaacccgatggcccgcagactactaccacctcaccttttttcacttctgttgaacaatcggtcagcacctgaaagtgaccataccattttgaaacatttttcagggtaatcattaaacagtccttttcttcaaatagctgaccagcaacgacgcgctcaggctgataacaaaataaacggcgccggcgaacagaatcatttcgacctgagtaccgtcacgctcgccgatagtcgacgcggtgcggaagaagtccgccaggctgagtacataaactaaagaggtgtcctgaaatagcacgatgccctgcgtaagcaacagcggcaccatcgcccgaaacgcctgcggcagaataatgagcttcatcgactgccagtgggtcatccccagcgccagcgcggcgctggactgcccgcgggaaatactttgaataccggcgcgaataatctcggaatagtaggccgcttcaaacatggagaatgccaccatcgcggagatcaggcggatatcggttttcggcgatagtcccagcacgttttgcagaaagccgggtacaatcagatagaaccacagcaagaccatcaccaacgggatggaacggaaaacgttaacatacgctttagcaaaccaggcgataggggcaaagcttgagaggcgcatgacggccagaatggttccccagactatccccacgataacggcggtgacggtgatcttcagcgtgatgaccaacccggccagtaggtaaggcagtgaggggataatcgaactccagtcaaattcgtacattatttgctccccacgttgcccggcaggcggactttgcgttcaaccaggctcatgaccagcatgataacggcgttaatcagcacataggccagcgtaatggcggtgaaggattcccaggcgtgcgccgagtaatccaacagtttgcctgcctgcgccgccatatccaccaggccgatggttgaggcaatagccgagtttttcaccaggttcatcatctctgacgtcattggcggtacgataacgcgataggcattcggcagcaggacatagcgataagcctgcggcagcgttagccccatcgccagcgccgcgttcttctgcccgcgaggcagagactgaatcgcggcgcgcacctgttcgcaaacgcgggcggcggtaaacagtcccagacagatcattgaggagaggaaaaactgaatattgggatcgagttccgccttaaaccacatgccaagatcttccggcaacagttcaggcaccaccaggtaccaggtgaagaattgcacgatcagcggcacattacggaacagttctacgtacaacgtgcccagtccggagaggaaacggttgggaacggtacgtaaaatgccgaaaatagatcctaccaggaaagcgataatccaggcggtaatcgaaagggcgacggtgacctgaaaaccactccatagccagccgagataggtggtattgccgaagggggcttcctgtaaaaaaataccccagttccagtctattgacatacatctactccgaaaaaaaagggtagcagcgctaccctcgaagattgttgcccggcgatttgcggcttcaggcccgatggggaacgaccatcaggcttatagtctgtccgtgctgagcgacaatcgagaggacaggagtcccgtcccatttagttttagttagttaagcgctttatcattcggtgctttgaacagggctttcatctcgtcagacaactcgaaattcatgttcaggtttttcggtgggatcggatttttaaaccacttatcaaaccacttttccgcttcgccggaggtttgcgcctgggcgatggtatcgtccatcagctttttaaactcaggggcgtttttacgcagcatacagccgtaggcttcctgggactgcggtttaccgacaatctcccagttatccggtttcttggctttggcgcgctcgccggccagcagcgcgtcatccatcataaaggcgacggcgcgaccgctttccagggtgcggaacgagtcaccgtggtctttcgcgctaataatacgcatccccatcttttgctcttcgttaagcttatgcagcagaatttcagaggtcgtcccggaggtgacgacgaccgctttgcctttcagatccgggaaatctttaatatcgccgccttttttagtcagcagtcgcgtcccgacgacgaaaatcgtatcggagaaggcggcctgtttctggcgctcaaggttgttagtcgttgaaccacattcaaaatcgaaggttccgttttgcaatagtggaatacggttttgcgaggtgatcgggatcagcttcacctgcagatcgggcttgttaagtttcttttttaccgcttccacaatggcgttggagtagtcctgggaatagccgaccactttctgctggttgtcgtaataagaaaagggcacagaagattcgcgatgcccgacgacgatcacgccatttttagcgatcttgtccagggtgctaccagcggcaggcgcgccatcttctgcgtgcgcaaggcccgcagacagtcccatgaccagcattgctgtggttagcttacgtaattgcatatccaactcctttatcatctgcgccgtcgacgcattgatagctattgtgatgttgttattgcctgcaacttgcgcgtgcagtgttatgtgtgtttgttaacatttagtgtggcttgttgtaaatattttgctgcgatattgtttatttttgcgaagtgcgccgcaccgttcagaggcaaaaatcctacattgcaccgttcaggtgctaccgatgatcgattttggtgcgaccaggttgcacaagcagccagaacaggtttgccatgtttaacaaagcaatagacgtgccagaatgggggaaaaaggaggattttcaggccggataaatgaagcgctatccggcctggggagagattatttccgtcgttgtcgcagactcatcactaccgcgccaaaagcaaacagcgcggtcagtacccatagcggccagttgccggtacgggcatagggagttaaccccgtggttggcgtgacattggtggtcagtacctggcgtgtgaactgcgggatcatcgcctgaatctcgccctgagggccaatcaccgccgtaataccgttattagtactgcgcagcaacggacgcgccagctccagcgaacgcatccgcgccatctggaaatgttgccacgggccaatggacttaccaaaccaggcgtcgttagaaatcgtcagcagatagtcggtgtccgggcggaagttatcccgcacctgttcgccaagaataatttcatagcagattgccgccgtcagcttatagtcgtgcgcatgtaactgcggctggatataagggccgcggctaaaggaggacatgggcagatcgaagaacggcgccagcggacgcaggatagactccagcggaacgaactcgccaaagggcacaaggtgatttttattgtagcgattgggcgagtcataactgtatggattatccttgcccaacgtaataatcgtattgtaggtgtcgtatcgattctgtttattgagacgcgcatcgacaataccggtgatcagcgtgctatttttttcgcgtaacatctcgtccagcgaacgaaggaagggctgctgattgatttcgagatccggaatcgccgactcaggccagataataatctgtgatttgcctaactctgggcgagtttcgttgagataaatttttagcgtattcagtagctggttttcgtcccacttcagcgactgcgggatatcgccctgcaccagcgatacctgggtcgctttggccggttccagcgtaaaccactggatataacgtagcggaaagggcaaagcaaacagaatcacggcgacagccagcggacgccagttccgcgtcgccagtgccagcgctaacaggccgctgaccatcatcagcaggaagttgatcgcttcgacgcccattaccggcgccaggccttttagcgggccatcgacctgactatagccaaattgcagccaggggaagccggtcagcacccagccgcgtaaaaattcggtgatttgccatattgcaggcgcggcgatagcgacgcgcagccagttggtttttggccacaggcgcgacaaaatcccggcaaacagtccggtatacagcgagagataagctgcaagcagcaccaccagaaaaacgttaaccgggcccggcatgccgccaaactgcgcgatactgacataaacccagttaatcccgctaccgaaaagtccgagtccccagcaatagccgatggcggcagactggagcgggcggcgattaaacgttaaggcctgcagcccgataagcgacactatcgctgcgggccagacgtcatacggagagaaagccagtgttccgcaggcgccgaataataacgccagcagcaggcgaatacgctggcgttcaattaacgaggcaaatgccatttttagtccactattgctgttattcgtccagttttggctggggcgagtcatccgggatcctgacatgcacctgaataatacgacgactatcggccatcgccactttgaactggtaaccatcaatgtcaatggtttcgccgcgggccggtaaatggccgaacgcctgcatcaccagcccgccgatggtatcgacctcttcatcgctgaagtgggtgccgaaagcgtcattgaagtcttcaatcgacgccagcgcgcgaatcgtccaggtatggcggctaagctgacggaagtcgatatcgtcttcttcgtcatactcatcttcaatttcaccgacaatcagttcgaggatgtcttcgatagtcacaaggccggaaacgccgccaaactcatcgataacgatggccatatggtagcgctgggagcggaattccttgagcatacggtcaacccgtttgctttccggtacgacaaccgcggtgcgtaacactttgtccatgctgaaggcttcggcatcgctgcgcataaacggcagcaaatctttggccatcagaatcccttcaatgtgatctttatcttcgctgatcaccggaaaacgcgagtgggcggactcgatgataacatcaagacattcgtccagcgtctggttgcgttttagggtaatcatctgggagcgcgggatcataatatcgcgaacgcgctggtcggcgatgtccattacgccttcgagcatatcgcgcgtatcttcatcgataagctcgttctgcccggaatcacggatcagcgccagcaactcatcacggtttttaggttcaccgtggaaaagctggctgagtagcagggaaaaaaatccctttttactgtttactgtgtcactactgtgtgaattgtcgtcgctcatggcgtcgtatgggttctcatgttagttaatacaaagctcgtcatgcgtatactcagctgtgacggcatgttttgcctgatggcgctacgcttatcaggcctacaaaaggcatgaatgtaggccggataaggcgcaagcgccgccatccggcaagctactattctgcaatcttctcggcaatgtacggatcctcatagcccatagcaagcataatctccgtttcgagagactccatctcttccgcttcgtcatcgtcgatatgatcgtaacccagcaaatgcaggctaccgtgcacgaccatgtgcgcccagtgcgcctccagcggcttgctctgttcttgcgcttcctgctccacgacctgacggcaaataatcagatcgcccagtagcggcatttcaatgccggcgggcgcttcaaacgggaaggagagaacattagtgggtttatctttcccgcggtacgtcaaattaaggtcgtggctttcggcctcatccaccagacggattgtgacttccgcctcttcctgaaactgcggaataacgccgtccagccagcgttgaaactgagcttcatccggcaggcccgcgtggttttcacaggccaactgtaaatcgaggatcacctggctcatttctgttcctgctcctgggcttcacgcttacgctctgccgccaacgccgctttgcgtttttgttcggcctcttcccaggcttcataggcgttaacaatgcgggcaacgaccggatggcgcaccacgtcttcgctgtggaagaagttgaaactgatttcatcgacttccgccagcacttcaatggcatgacgcaagccggatttggtgttgcgtggcaggtcaatctgcgtcacgtcgccggtgatcaccgctttcgagttaaagccgatacgcgtcaggaacatcttcatctgttcgatagtggtgttctggctttcatccagaatgataaaggcgtcgtttaatgtgcgtccgcgcatataggccagcggcgcgacttcaatcacattgcgttcaatcagcttctcgactttttcaaagccgagcatttcgaacagcgcgtcatacagcggacgcaggtacgggtccaccttctgacttaaatcgcctggcagaaagccgagtttttcgcccgcttccaccgccggacgggtcagtagaatacggcgaatctcctggcgctccagggcgtctaccgcagcggcgaccgcaagatacgttttaccggtacccgccgggccgacgccaaaggtaatatcatgatcgagaatattggcgatgtactgcgcctggttcggggtacgcggtttaatcacgccgcgcttggttttgatattaatagctttgccatagtcaggcacgctttccgcgctctgttccagcacccgcgcttctttgatcgccagatgaatttgttccggttcgatatcctgagtctggccgcgcatcggtgcggtatcgacatacagacttcgcaaaatatctgtcgccgcggtcacgcaaatcggacgaccggtcagtttaaagtgattgtcacggcggttgatttcaataccgagacgacgttcgagctgtttaatattgtcatcaaacggcccgcaaaggctcaacagacgggcgttgtctgcgggctcaagggtaatttcgcgagtgtctatattcaaactgttcctcttgtgtctgtatcgccggacgctgaacacttaccggcatctaaggaaattattcacgccatagggaaaaggcgcaagcattgcaatgaagatggggatgaagagagaaaattgcaaggcccgtcgggcgacaggccatgaccaggaagcccgacaggcgtagcgccatcgggcattattgccttttcagtagggttaaggctggtagaatcctacgcccagctcattttctttacgggtacgggcaatgacggactccggcgtttcggcgacgcgcagccccatttcatcttcggtacgcaccacttttccgcgcagggagttcggatagacgtcagtaatttccacatcgacaaacttaccaatcatctccggcgtgccttcaaagttcaccacccgattgttttcggtacggccagacagttccataatgtttttacgcgacgtgccttccaccagaatgcgctgtgtcgtgccgagcatacggcggctccatgccatcgcctgctgattgatacgctcttgcagaatatacagacgctgcttcttctcttcttccggcacgtcatcaaccatatcggcagccggcgttcccggacgcgcagagaagataaagctgtagctcatatcaaagttgacgtcagcgataagcttcatggttttttcgaaatcatcggtagtttcgccagggaatccgacgataaagtcagagcttatctgaatgtccggccgcgccgcgcgcagtttacggatgattgctttatattccagcgcagtgtgggtgcgccccatcagattcaacacgcgatcggaaccgctctgtaccggcagatgcaggaaactgaccagttccggcgtatcgcggtatacctcgataatatcgtcggtgaactcaatcggatggctggtggtaaagcgaatacggtcaatgccgtcgatggcggcaaccagacgcagcagatcggcaaaggtaccggtggtgccgtcgtagttttctccgcgccaggcgttaacgttctggcccagcaggttgacctcacgcacgccctgcgccgctaactgggcgatttcgaacaggatatcgtctgagggacggctgacttcttcaccgcgggtatacggtaccacacagtaagtacaatatttattgcagccttccatgatagaaacgaaagcggtcgggccttctgcgcgcggttccggcaaacggtcgaacttctcgatttccgggaagctgatatcgaccaccgggctgcggtcgccacgcacggagttaatcatctccggtaggcggtgtaaggtttgcgggccaaaaataatgtcgacgtaatgggcgcgttgacgaatgtgctcgccttcctgggaagccacgcagccgccgacgccgataatcagatcgggatttttctcttttaacagtctccagcgacctaattgatggaagactttttcctgagccttctcgcggattgagcaggtattcaacagcagcacatccgcctcttccgccacgtcggtcagttgatagccgtgggtggcgtccagcagatcggccatcttcgatgaatcgtactcgttcatctgacagccccaggttttaatatggagttttttagtcatcgacttgctcttgcgaaatagtggctgaaaagcagggcgcatagtgtaatgctttggcgcggttgtgaccagtatgactgacgtcagccctaatgggtaaaaaatcctgtaaacttgtctaaaacgtaacaggatgaatgaccatgacaaatcaaccaacggaaattgccattgtcggcgggggaatggtcggcggcgcgctggcgctgggtctggcgcagcaagggtttacggtgatggtaatagaacatgccgcgcctgcgccgtttgtggcggacagccagcctgacgtgcggatttcggccattagcgcggcatccgtggcgctgctcaagggactgggcgtttgggaggcggtgcaggggatgcgtagccatccttatcggcgactggagacctgggagtgggaaaacgcccatgtggtgttcgacgccgctgaactcaagctgccgctgttaggctatatggtagagaacaacgtcctgcaacaggcgctatggcaggcgctggaagcgcaccccggcgtgacgctgcgcgttccggcttcactggcggcattgcaacgccgccacgatggttatgcgctggaactggccgacggcgaatgtatcacgccgaagttagtgattggcgccgacggcgcgaattcgcaggttcggcaaatggcgggaattggcattcatgcctggcaatatgcgcagtcgtgtatgcttatcaccgtcaagtgtgaaaatgcgccaggcgacagcacctggcagcagtttacgccaacggggccgcgcgcctttttgccgctgttcgatgattgggcgtcgctggtgtggtatgacgctccggcacgtattcgccagttgcagggtttatcgatgacgcaattgcaggtggaaattaaccagcactttccggcgcgtctgggggcggtgatgcctgtcgcggcgggcgcgtttccgctaacccgtcgtcacgcgttgcagtatgcgcaaccggggctggcgctggtaggcgacgcggcgcataccattcatccgctggccgggcagggcgtcaacctggggtatcgggatgttgatgcgttgattgatgtgctggcgagtgcccgtagctatggcgagtcctgggccagccattcggtgttgaaacgctatcagacgcggcgcatggcagataattttatgatgcaaagtggaatggatctgttttatgccgggttcagcaatgaactgccgccgctgcgtattttacgcaatatggggctgatggcggcgcagcgcgcaggcgtgctaaaacgtcaggcgcttaagtatgcgttggggttgtaacccgttgaatgccttacccggtttgtaaaaacgctcaattgcaggtcgggtaagcgtattgacatcttactttactgcaaataaagcacataaacctaatttccctttaaaatcaatttcataccaaggtgatgccatttcaattgtgcatacgttgtattggcaacgtactactttatgtagcatcagtaatgtggaactcattgattttacaagaatcgccagggtgattaatgcggcgataatccgataccacgtcagtgttgcatgttggacatcaaaccacagaatataaaaagtgatgatgtgaagaatgactttgctggacagggcgcgaatatagaatccacgcagcgccgttttcgaggaaaacgcgacattaatcagcgcgctttgtttttcttgcacagggatccctggcagatacactatccattccgcactattctggcgcaacatgacggcctttttctggtgcagtatatgtagcctcattgacactgccacggggtaaaccagacccaaaataatcaaccaggcggcgctggccgtgatatcaatgaaggtgaaagcgcagagcaagacgaccataaaaaatgttaatggccgcaaaaagagataccaacaaaactggtaattcattgtgaggttaccgaacgatccctgtaaggctttatcatagcgttttactgatagcagggcattaagggggaaacctctttcggaatttataaacgcagaaaagcaaaaagctcgccgaagcgagctttttaaaggtggctggggtacgaggattcgaacctcggaatgccggaatcagaatccggtgccttaccgcttggcgataccccaattgtcgtacttcttgcgctcattagcagagcgtctttaaaactggctggggtacgaggattcgaacctcggaatgccggaatcagaatccggtgccttaccgcttggcgataccccaacaaattattttcgaaccggtcgaatacctcgacgtgttctgaatatggtggctacgacgggattcgaacctgtgaccccatcattatgagtgatgtgctctaaccaactgagctacgtagccagatgatttcttcgatggctggggtacctggattcgaaccagggaatgccggtatcaaaaaccggtgccttaccgcttggcgataccccaataccgtcgcggtgaaccgcaaactcgaagaaatatggctggggtacctggattcgaaccagggaatgccggtatcaaaaaccggtgccttaccgcttggcgataccccatccgtacaacgcttatcggtgaatggtgcgggaggcgagacttgaactcgcacaccttgcggcgccagaacctaaatctggtgcgtctaccaatttcgccactcccgcaaaaaagatggtggctacgacgggattcgaacctgtgaccccatcattatgagtgatgtgctctaaccaactgagctacgtagccatctttttttcgcgttaccttatcggcgttgcggggcgcattatgcgtattgagccttgaagcgtcaacctctttttcatcgaaaaacgtcggaaagtgtctgtttggttaggttgcgaacagcgtggcgcaatattcggcaattattggttattaatcgtttttccgaaagtagtttgctataaaaaaagagcccctaagggctctttcgtcatcgttaatttactggtacgccgactgatgcacgccgaccgcgcggcctgacgggtcatccatcgttttgaatgcttcatcccactcaatggctttggcggaagaacaggccacggacgggccgccgggtacgcattccgccgcgctcggcaccgggaacagctcttcaaaaatttcgcggtacagatacgcctctttagacgacggcgtgttgtatggaaagcggaagcgggcggtttccagttgttgatcggaaatctgtttcgccgccacctctttcagcgtatcaatccagctgtaacctacgccgtcagagaattgctctttctgacgccacgcgacgcttgctggcagataagactcgaagcactcgcgcagcacgtgtttttccatcttgccgttgccgcacattttatcctgtgggttgatacgcatcgccacgtcgaggaattttttatccaggaacggtacgcgcgcttccacgccccaggcggacatcgctttgttggcgcgggcgcagtcatacatatgcagcgcctgtagcttacggaccgtctcttcatgtaactctttggcgttcggcgctttatggaagtacaggtagccgccaaacacctcatcggaaccttcgccggagagcaccattttgatgcccatcgctttgatcttacgcgacatcagatacatcggcgttgaggcgcggatagtggtcacgtcataggtttcaatgtggtagataacatcacgaatggcatcaaggccttcctgcacggtgaagtgaatttcatggtgcacggtgccgaggtggttagccacttcctgggccgccttcaggtcaggcgaaccttccagaccgaccgcaaaagagtgcaactgtggccaccaggcttcggagcgctcctgatcttcgacgcgacgggcggcgaattttttggtgattgccgaaataaccgacgagtccagaccgccggagagcagcacgccataagggacgtcggacatcaggtggcttttcacggattcttccagcgcctggcgcagcgcgtttttgtcggtaacgttgtcttttaccgcatcgaactcaaaccagtcgcgctgatagtactgacgaatttcgccgtctttgctccacaggtagctgcccgccgggaactctttaatggtgcggcagaccggggtcagcgctttcatttctgacgctacgtagaagttgccgaattcgtcataacccatatagagcggaataataccgatatggtcacgaccaatcagataagcgtctttttcgctgtcatacagggcgaaggcgaacatcccctgtaaatcgtcaaggaaatccggccctttttcctgatacagcgcgagaataacttcgcagtcggagcctgtctggaacgcgtaacgatcgccatactccgcgcgtaacgtctgatggttataaatttcaccgttcaccgccagtacgtgggtttttctggcgttatacaggggctgggcgccagcgttaacatcaacaatcgacaagcgttcatgtgcgagaatcgcgttatcgcaagcgtagatgccggaccagtccgggccgcgatggcgcatcaggcgtgacagttcaagggcttttttacgcagttccgctgcatctgttttgatatcgaatacgccgaaaatagaacacatagccttctccgttaatctgttgcgtcgtactttttgtatttgcttgactaaaaaatgccgcaaaggcgtggaaggcgcaaggggattacggtctgaaaaatgaaaaatgcaatcgtcattgttgattagtgaaaaatgattacgtattgcgcggatttattgatggatcttcagttttatcgtggattaattgaattatgtttttcctgatggcgtttcgcttatcagacctacaatgttgttcgaaccgtaggcctgaaagctatgcgtcatcaggcagaggacaggtttagataacgtctatctcggcgacggaagggtaaatccagcttgggcggaacggcatactgtcaatatcattgatcgttgatacgcctgaaagcaccagaatggtctccagaccggcctggaaccccgccagaatgtcggtgcgcaggttatcgccgacaataacggtctcttccgagtgcgcctgcattttgtttaacgccgcgcggatgatccacgggctgggtttgccgacataaaatggcttccggccggaaattttttcaatgcctgcgcacagcgcgccgcaggccggataaaagccgcgaccgtgggtatccgggttggtggcgataaagcgcgcgccattggcgacgaaaaatgctgctttatgcatcatgtcccagttgtaggagcgggtttctccaacgatgacaaaatcagggttcacatcggtaatggtaaaacccgctttatagagctcgtgaataagcgcgccttcgcccacgacatacgcttttttaccttcctgacggcgcagaaaatcggctgtcgccattgctgacgtataaaacacgctgtccggcacgttaacgccagcggtagcaaaacggttcgccagatcctggccggtttgcgatgggtaattggtcagcagcaccagcggcagacctttttccagaatccccgtcagaaattccgccgcaccgggtacggctacgttgtcgtgcatcagcacgccgtcgatatcgcagattacattcttgatggtcatgaactacccagggaatttgtgaataatccgatactataagagcgcatcaactttccagcaaacattgcagcaatgttccgttgagcatggcgcgtttaactaaggcaaatgcgccgatagcagaacggtgatccagcgtggagcgtaccaccggcaaatttttgcgaaatgcctttaacgcctgcgtattgatacagctttcgatagcgggtaacaggactttatcggcttcaatgatctcgccggcaatgacgattttttgcggattaaacaggttgatagcaatggcgatcgttttgcccaaatggcgaccaacatgctcaatgacttccgaggccaggctgtcgccccggtttgccgccttacagatggttttaatcgtgcagtcgtcaagcggaacacggctttgatacccttgtttaagcaaattcagcacccgttgttcaatcgccgcattggcggcaatggtttccagacagccgaaattaccgcagtggcagcgctcgcccagcggctccacctgaatatgcccaatttcaccgacgttgccgttacggccaatgaagatgcgtccgttggagataatcccggcgcctgtaccacgatgaacgcgcaccagaatcgagtcctcgcaatcctgactggcgccgaagtagtgttccgccagcgccaggctacggatatcgtgtcccacgaaacaggtaacgtgaaaccgtttttccagcgcttcgaccagtccccagttttcaacctgaatgtgcggcatgtaacgaatcacgccgctttccggatcgacaagccctggcaggatcaccgagatagcgatcaattcacgaattttacgctgacagctatcaataaagacggcgatagtgttgagcagcgcatgttccagcgtctcctgggtgcgctccggcagcggataatgctcctcagcgaccactttactgctcagatcgtagagcgttaaagtggtgtcatgacgccccaggcgaacgccaatggcgtggaagttacgggtttccgtgacgatagagatagcgcggcggcctccggtagaggcctgctgatcgacttctttgatcagcccgcgttcaatgagttgacgcgtaattttcgttacgctggcgggagcaagctggctttgctcggcaatttgtatgcgcgagataggaccatgctggtcaatcaggcggtaaacggccgcgctgttaagctgttttacgagatcaacgttacctatctgagcttgtccgcctggtgtcatattctcacttactcaagtcaacgacctcgtcaccattaacgatggtcttgataattttaaaatcgtgggtgaacgcggtcaggttggcgactttacccggcgcaatgctaccgagatgtttatcaacgccgatagcgcgagccggatagagcgttgccatgcgcagcacttcatccagcgcgatgccgcaatgcgcgaccaggttgcgtacgccttcaatcatggttaaggacgaaccgctcaacgtaccgttttcatccacacacagtccattgcggtagtatattgttttacctgcgaaaatgaactgctcaatattggcccccgccggtgcggtggcgtctgtcaccagacaaagtttgtcgcctttcaggcgtttggcattgcgaatgttggcgtagtcgacatgcagaccatcggcgataacgccgcaataaatatccgcttcgtccagaacagcgccagcaaggcccggctcacgccctgtaatgtacggcatcgcgttaaacaggtgagtcgcaaaggtaatcccggcgcggaagcccgctttcgcctcttttaacgtcgcgttggagtgacctgcggaaaccacaatgcccgcattcgccagtttagcgattacgtcagcaggcaccatttccggcgcgagtgtgactttggtgatgacgtcggcattatcgcataagaaatcgaccagcgcagcgtctggtttacgcacgaaatcaggattatgggtgcctttttttaccagattaagccaggggccttccaggtggagacccagcgcctggtgcggatgtttttccaggtattcgcgcatgacgcgaatgccctgtttcatcaattcgtcgctggtagtgataagcgttggcagaaagttagtacagcccgatttttcattggctttctgcataatttccagcgtttcaacgctgacggcttctgcggtatcgttaaactgcacgccgccgcagccgtttagctgcacatcaataaaaccgggggagagaatggccccattcaatgagcgttgttctattcccggcggcagttcggccatcggacaaacgcggtcaatcaggccattagcgacaacaagcgcatggtcatcaagaatttcgtgaccggtaaagatccggccctgggttaaagcatacattccgacccccgatatcaaaaatttaccgccccgcattgactggcggggcggagacaacattacagacctttaatattttctgcttctaattcattgaaatatttcaatgttttaactttaagttccattgtggacggctcatcgcataccacaaccgctttcggatggagttgcaggcagctaatggtccacatgtggttgacgttgccttcaaccgccgcctgcagcgcctgggctttctgatggcccagcaccagaatcatcacttcttccgcatccagcagagtacccacgcctaccgtcagcgcgtatttcggcacctggtttacgtcgccgtcaaagaagcgggagttcgctacgcgagtatcatgggttaacgttttgatacgggtgcgggaagccagggaagacgccggttcgttaaaggcgatgtgaccgtcgttgccgacgccgcccataaacagatggattttaccgtaagaacgaattttttcttcatattgacggcattctgcatcgatatccggtgcgttaccgttgagaagattgatgttttctgctggaatatcaacgtgatcgaaaaagttacgatgcataaagctgtggtagctttccggatgctctttcggcaggccaacatattcgtccatattaaaggtgaccacatgcttaaagctgacctcgcccgctttgtgcatctcaaccagcgctttgtacgccgttagcggcgtgccgccggtaggcagtccaaggacaaacggacgatcggcggtcggtttgaacgcattaatacggttaacgatatggcgagcggcccatttgccaacctgttctgcggtactcagggggatcagtctcattcttcacctcaataatcaatgtcaaaatttggcggatcgtattaagcgtaacctggatatccagggttcgtgttcaatccgtcctgattttttgaatcataaaataagttttctgtgttagccagtggatggtaggggtgattacgatatttagtgattataatcacaaaaaacacccgtttaatttgcgaggcgaattaattttccacacactctgcagaagatgatctcaccgttcgattacagaacatcacgtttttaacgtttgcagcacaataaaaaacggcttcaaagaagccatatcggcgtctcgtagggggaataagatgaatattttaggttttttccagcggctgggtagggcgttgcagctccctatcgccgtgttgccggtggcagcgttgttgctgcgattcggccaaccagatttgctgaatatgccgtttatcgcgcaagcgggcgggtctattttcgataacctggcgctggttttcgctatcggcgtggcctccagttggtctaaagatagcgcgggcgcggcagcgctggcgggagccgtgggttacttcgtcatgaccaaagcgatggtgacgattaacccggaaatcaacatgggcgtgctggcggggattattaccggtctggtcggcggcgcggtttataatcgctggtctggtatcaaactgcctgattttctcagtttcttcggtggaaaacgttttgtaccgatcgcaacgggctttttctgtctggtgctggccgctattttcggttacgtctggccgccggtacagcatggcatccatgcgggcggtgaatggatcgtttccgcaggcgcgctgggttccggtatctttggcttcatcaaccgtctgctgatccccaccggtctgcatcaggtactgaacaccatcgcctggttccagattggcgaattcaccaatgccgcaggcactgtattccacggcgacatcaaccgcttctatgctggcgacggcacggcggggatgtttatgtccggcttcttcccgatcatgatgtttggtctgccgggcgccgctctggcgatgtatttcgccgcgccgaaagaacgtcgtccgatggtgggcggtatgctgctgtctgtcgcgatcaccgcgtttctgaccggcgtaaccgagccgctggaattcctgtttatgttcctggcgccgctgctgtacctcctgcacgccattttgactggtatcagcctgttcgtcgcgacgttgctgggtatccatgcgggcttctctttctcggcaggcgcgatcgactatgttctgatgtataacctgccagcggccagcaataacgtctggatgttgctggtgatgggcgttgtattctttatcatctacttcctgctgttcagcgcggttattcgtatgtttaacctgaaaacgccgggccgcgaagataaagttgatgagatggtaacggaagaagccaacagcaacaccgaagaagggttaacgcaactggcgaccagctatattgctgcggttggcggtacggacaacctgaaagcgatcgatgcgtgtattacccgtctgcgcctgaccgtgaatgactctgctcgcgttaacgatgcggcctgcaaacgcctcggcgcttccggcgtggtgaaactgaacaaacagaccattcaggttattgtcggcgcgaaagcggaatcgattggcgatgaaatgaagaaagtggtggcgcggggaccggtcgcggcagcgtctgctgatgcggctcacgttgcaacacctgctccggcggccaaaccccaggcggtgccgaatgcggtaactatcgctgaactggtctctccgattaccggtgaggtagtggcgctggatcaggtaccggatgaagctttcgccagcaaagcggtcggcgacggcgtggcggtgaaacccaccgataaaaccgtggtttctccggcggcgggtactatcgtgaaaatcttcaacactaaccacgcgttctgtctggaaaccgaaaaaggcgcggagatcgttgtccatatgggtatcgataccgtcgcgctgaacggtcagggctttaagcgtctggtagaagagggtgcggaagtcacggcgggtcagccggtgctggaactggatctggacttcctgaatgccaatgcgcgttccatgataagcccggttgtttgcagcaacagcgatgacttcagcgctctggtcatcaaagcggatggtcacgtggtagcgggtaaaacgccactgtacgagatcaagagcaaataatcgcttcctggccggataaggcgtaagacgccatccggcgatatcacaggaaacataagcggcagagggaaaccttcgccgcttttttttaccgcaattagccccaatattttctgcaaagccactttttaagtaactaaaggttgtcagtctgtccggcttataagatcatatgccgttatacgttgtttacgctttgaggaatccacgatgagtgaggctgaagcccgcccgactaactttattcgtcagattattgatgaagatctggcgagtggtaaacataccactgtccatacccgttttccgccggagccgaatggctatctgcatatcggccacgcgaaatctatctgcctgaactttggcatcgcgcaagattatcagggccagtgcaacctgcgtttcgatgacaccaacccggtaaaagaagatatcgagtacgttgattcgatcaaaaacgacgtcgagtggttaggctttcactggtctggcgatattcgctactcctccgattactttgaccaactgcacgcctatgcggtcgagctaatcaataaaggcctggcctatgttgatgagctgacgccggagcagatccgtgaataccgcggtacgctgaccgcgccgggtaaaaacagcccgttccgcgatcgcagcgtcgaagagaacctcgcgctatttgaaaaaatgcgtaccggcggttttgaagagggtaaagcctgtctgcgcgctaaaatcgacatggcgtcgccgtttatcgtgatgcgcgatccggtgctgtatcgcattaaattcgccgagcatcatcagactggcaacaagtggtgcatctatccgatgtacgactttactcactgcatcagcgatgcgctggaaggcattactcattctctgtgtacgctggagttccaggataaccgtcgtctgtacgactgggtgctggacaacatcaccattccggttcacccgcgccagtacgaattctcgcgcctgaatctggaatacaccgtgatgtccaagcgtaagctgaacctgctggtgaccgacaaacacgtcgaaggttgggacgatccgcgtatgccgactatttccggtctgcgccgtcgcggctataccgcggcttctattcgtgagttctgcaaacgcatcggcgtcaccaagcaggacaacactattgagatggcgtcgctggaatcctgcattcgcgaagatctgaacgaaaacgcgccgcgcgcgatggcggtaatcgatccggtaaaactggttatcgaaaattacccgcagggtgagagcgaaatggttaccatgcctaaccatccgaataaaccggagatgggcagccgtgaagtgccgtttagcggtgagatctggatcgatcgcgcagatttccgcgaagaagcgaacaaacagtacaaacgtctggtgatgggcaaagaagtgcgtctgcgtaatgcctacgtcattaaagcggagcgcgtagagaaggatgccgaagggaatatcaccaccatcttctgtacctatgatgctgatacgctgagtaaagatccggctgacgggcgtaaagtgaaaggcgtaatccactgggttagcgcagcacatgcgctgccgattgaaattcgtctctacgaccgtctgttcagcgtgccgaatccgggcgccgcggaggacttcctgtctgttatcaaccccgaatcattagtgattaagcaggggtatggcgagccgtcgctgaaagcggcggtagcaggaaaagctttccagtttgaacgtgaaggctacttctgcctcgacagccgctatgcaacggccgataagctggtctttaaccgcaccgtgggcctgcgtgatacctgggcgaaagcgggcgagtaagcactgcgccaacaggcgaatgctgtaaaaataccttgtcaacgccgcgttctgcggcgttttttctctgcatttctaagtcgattctcttttttgcgaggcgaattaattattctctgaaaattattgatctgataaatgattattaatctaaatgttataagcgtcaggtcaacaggagacaattattttcatgcctatggaaaacaagtcaattttctttctggcggtctgcttcccccaccagcagtcgaatgtaacagaaagcaattaaatatgtgcggttgctcatattattacatactggttacagaaagagattgataattcgcatcgcgaaaaatagtctatttaacgtagtaaatgaggtttctcagcgctactttttattttttcgctgttcgcttttgtcggcagcaatttatacgtcaaagaggattaacttatgcgtacgtttagtggcaaacgtagtacgctggctctggctatcgccggtatcacagcaatgtcggggtggatcgttgttccgcaggcgcaagcctccggctttttcgacgactccacgttaacgggcggcatctattattggcagcgtgaacgcgatcgcaaagatgtgaccgacggcgacaaatataaaactaacctttctcatgcgacctggaacgctaacctggattttcagtctggttacgctgcggatatgttcggtctggatatcgcggcgtttaccgcgattgaaatggcagaaaacggcgacagcggtcatccaaacgaaattgccttctcgaaaaagaataaaggctacgacgaagactattccggcgataagagcggtatcagtctttataaagccgcagcgaaatttaaatatggcccggtctgggcgcgcgccggttatattcagcctaccggtcagacgctgttagcgccgcactggagttttatgccgggtacctatcagggtgcggaagccggcgccagttttgactatggcgatgcgggcgcgttaagtttttcctacatgtggactaacgaatataaagcgccgtggcataccgaaatggataagttttatcaggcggataaaaaaaccaatgtggattatctccactccatcggcgcgaagtacgacttcaaaaatgatctggtgctggaagcggcgtttggtcagtccgaaggctatgtcgatcaatatttcgcgaaggccagctataaatttgatttaggcggcaatccgttcaccaccagttaccagttctacggcgcgcgcgacaaagtagacgatcgcagcgtgaatgatatttacgacggtacggcctggctgcaggcgttgaccttcggctacaaagtcgcggaagtggttgacctgcgtctggaaggcacctgggtgaaagcggacggtcagcagggctattttctgcaacgtatgacgccaacctacgcctcttcaaacggtcgtctggatatctggtgggataaccgctccgactttaacgctaacggtgaaaaggcggttttcttcggcgcgatgtatgacctgaaaaactggaatctgccgggctgggctgtgggtgcgtcttacgtttacgcctgggatgctaaaccggcaacctggcaaagtaacccggatgcttactacgacaaaaaccgcactatcgaagagtcctcatacagtctggatgcggtttataccctgcaggaggggcgtgccaaaggcaccatgttcaaactgcactttaccgaatatgacaaccactccaatattccaagctggggcggtggttacggcaacatcttccaggatgaacgtgacgtgaaatttatcgttattgcgccattcactattttctgatgtcagatgcggcaggctgccggcctgccgcgctgttgaggaacgacctatgaaaaaaattttactcatcgccagcatgaccgccggtttgacggcctgcgcgtcatcacccgcgccggaagaagatagccggctgaaagaggcgtacagcgcctgtatcaataccgcacagggctcgcctgagaagatagaggcctgccaaagcgtgctgaatgtccttaaaaaagagcgcagacatcagcaatttgctaacgaagaaagcgtgcgggtactggactatcagcagtgcattcaggcgacgcgcacgggtaacgatcaggcggtcaaggctgactgcgataaggtctggcaggaaattcgcagtcataataacgtgcaataaaaccctgccttgccacccacgggcgaatgttttccgcccgtggttttttcaggctttattttctgccgcgatatagccgcgactcagacgtacaaacagcatcgccgtcgcggcaagtccacataacgctgcgcacatcagccaccagccgggcgagcttttatcgccggttaactttaccagcgcggtagagatggccggcgtcaggccgccaaaaatcgccgtcgccaggctaaaggccagcgagaaaccaacggtacgcacatagactggcatcacttcggttaacgccgcgaccattgcgccgttatacatgccaaaaaagaaagagaaccacagcagtaccagcgtcatgcgggtaaagtcgggcgcggcggtcagccactgcatgacgggccaggtggtgatcagcgccagcaacgtaatgcccattaacacagcgcgacggccaatccggtcggaaatcgcgccgccaatgggtaaccagataaaattggacacccccactaacatggtgacgatcaaactgtcccgcgcgctgagattaagcacggttctgccataggtcggcgtataaacggtgataaaataaaacgttgtggtggtcatcgccaccagcagcgttccggctgtaataatgcgccagtttttggcgatagttgcaaaaatttccctggtgtcggggcgatgcttgcgttgtaaaaacgcttctgtttcttgtaatgaacgacgtaaaacaaaaatcagcggaatgatcatacagccgataaagaacggaattcgccagccccactccgatatcgcgtcgtgtcccagcgtgatattcaggctataaccaatcaacgcggcaacaacgatcgcgacctgctgactggcggattgccagctggtataaaaccctttattgcctggcgttgcgatttcggacagatagaccgagacgccgcctaactcaacgcccgcagaaaatccttgtaataaccggcccaacagcaccaacgcaggcgctgccaggccgatcgtttggtagccggggacgagggcgatgagcaacgtaccgcagcccataatcgccagtgtcaccatcagccctttacggcgtccgattctgtcaatataggcgccaagcacaatcgcgccgacggggcgcattaaaaaaccggagccaaagacggcaaaggtcaacattaatgaggcaaattcgctttccgccggaaaaaacgttctggcgatataggtggcgtaaaatccgaacaagaaaaaatcaaactgttcaaggaaattgccgcttgtcacgcgcagtattgcgccgaacgtgccggcgcgcgatgttgcaggtgtgtgttgtgccatagggtttgctctccactgtctttattgttttatgggtaagatgttgcgggtcagttgcctgtatcccccgcatgttttccgcgtcgcttctcaactgcccatttgagtaaggccgcgcagcggaaaaatccgtgggcgaattttccgtagggaagggtgagaaagagcgccatcaccacgcctaaatggagcgccagcagtatgcccattccgctggtgtctctgcctgccagcagcgccagcccggtcagactggttaagaacagcagcagaataaagccgcgatccatgggtttctggcgcgcatcgccatgtaacggcgaccgccgcagattgagccacagtagcccggccgggccgataagcagaccgataccgcccagcgtgccgagcatgaccggcaggctaaaaaacgggtagggcgcttcccaaccggcgacgtagtgatagcccgtcgccacgaccgtggcggcaaaacagagcataaaaccgtaaaaggtaaagtgatgaaagcgacggcgcagcagcgtgaacgcatcgtccgcttcgttacagcctttgccgtgaccgccgtcgagatatttcagcgttaacgcattgtgcgacgcttccgcaatctctgccgaacgcggtacgcccggcgagatctcacgccagaagcggattacgcccgccataagcaaaccgattgccagcacaaaaactgagccgaacatccatgccagcaggctatgcggaaaaatttgatagaagtcaccggccagcggcggatgaatcagcgaccctttcagcgccatcgccagtaataaaaagagcgtcagaccgactatcagcgccagcgcgacggtgatccccgcccgacggtataacgcgccaaaagcggcgggctgggcatactgttgatacgtctccaggcgggcttgcgccatcgctttcggcacgttaatggcaaattcatggggcggcgcgtactggcacgcgtgcaggcaggcgccgcagttatgacataaattcgccagataatgaatatcggctttaccgaattcgagccgctgggtcatcgccggaaataccgcgcaaaaaccttcgcagtagcgacacgcgttacacacttgcatgacgcgttcgacctcggcttccggttcggtaagcacggtggcctcaatgattaatttttcaagctgtttcatgctgcgcctccttgtgcgccgcgcgggcggcttctattcccgcaatgcggccaaaggttgtgccgatagacatgcctacgcctgcggtataccccttgcccagaacatttcctgccatcatctcgccggcaacaaacaggttgcggcttggatgaccggcaaaatgcaccgcggcacgttcattgactttcagacccaggtaggtaaacgtgatgccgggtcgcagcgcataaccgtagtagggcggcgcatcaagcgggcgcgcccagtgggttttcgccggcgtcaggtttttagtggcgcagtcatcaagcaaggtatgatcaaaatgaccgggctggcaggcctggttatactgcgtgacggtatgggtaaatttttccgcgtccagccccaactggcaggccagctcagccagcgtattggcctgcgcgccaggaaaaaccggcggcataaagtggccgatggctttgctgtcaataatcgaatagccaatttgtcctggctgttgagcaaccagccgcccccaaatggcgtaacgcttcggccagaaatcttcgccttcatcataaaaacgttcggcgtcgcgattcacgacaatacccagcgatacgcaatccacgcgagtacaaataccgccgtcgtacagcggcgccctggcatcaatcgctacgcagtgcgactgggacggatcgccaatgatatccgcgccggcatccatcataaatttgagtaatacgccctggttaaaacgcgtgccgcgaatcaggaaattatccgcgggccattcgccgcgggcgttttctccccaggcctcccgcagccattcacggtttgattcgaaaccgccagccgctaatacgcaggctttggcggtaatccgttcgctacccgccagcgccgccacgaattcgccgtcatgaagttcaagcgcgtgaaccggcgtgttatagcgaacctgtacgcccagccgttcggcgctacggtaataggcattgacgagcgctttcccgccgcccataaaaaacgcattggtgcgcgcaacgtggagcgccccagatagtggcggttgaaagttaacgccatgtttgcgcatccagtcgcggcattgcgaagaggtgcgaatgaccagccgcgccagcgcctcgttggtgttgccgtcggtgactcgccacagatcctgccagaattcctcttcaggatagctttctaccagcacatcctgcggcgcatcatgcatacagcgcaggtttcgtgtgtgctgagaatttccgccgcgccattcccgcggggcagcctccagcagcagaaccgatgcgcccgcttcccgtgcggtcagggcggcgcataatgcggcattgcctccgcctatcaccagtacatcaaccatcttatactcccgtaccatttaactatttgttaaatttgtaattgaaatgtatacggataaataagcggtgcgctatcaggtagcgctaaacaggggtttagtaagcgtaaagggttgcgcctggccattcaccggcgtcgactaactgacgcataactttggtaaggactactctggcggcaaggccggcgggcgtcagttcatcatccgacaggctgactaaaaaattggggcggctgagtaccggattatggacgccgatcacgcgtagcgcgtcgttatccagatgagaaatcgccgcgccgggctgcaacgtggcgccaagaccgtcgcgcacggcgcgcatcaacaacgccaggccgtcaatttccgcgacgatttcaacgttaagcgcatgttcctggcagacagcgtccagcctgccgcgcagcccatgtccctggcttggcataatgagcggaatgcctgccagttgttcaggtgtgatcgggttatcaggaagcgccgccagcagggcatgggagccaatcagaaaaagctgttcttcaaggatcggtctggcgctccagcgcaggattttatctttttgaaagacaatggctaaatcaatctggcgggtattgatcattctttccagattaccggacaagctttccaccacatgcagtcggacatcggcatagttttcctgcatggcatggataaacggtatacccagtatggaggcggtactgggggccattcctacgctcacatgaccggaaaggcgcgcttctctggcggcgagaatcgcgtcgtcggcatgacgcagggcgagttgcgcctgtgaataaaaggccagcccggcgttggttggcgttacgccgcgcgaagtgcgctgcagcagacggatggcgagctcgttttccagacgggacatctgttgacttaatgctgaaacgccaatatcaagatcctgtgcggcgctgcccatactgccggtttcaataatacgcacgaaatagcgtaactggcgaagctccattcctgctctcctgagatgcgatagcgttttttacattaaatcaacatcaagcggcaggaaagaggaggatataaaaaagccaaccgggcggttggctcttcgaaagatttacacttatttagtcgcgtcatcgtgcgcgtgctcgtcttcgcggcagtcgccttcagcgcagtggccgtaaagatagaggctgtgattagttaaacgaataccgtgtttcgccgcaatttcacgctggcgcgcttcaatagagtcatcactaaattcaatcacttttccgcaatcaaggcagataagatggtcgtgatgatgctgttgcgtcagttcaaaaacggatttaccgccttcaaaattatggcgggtcacgataccggcatcgtcaaactggttcagcacacggtatacggttgccagaccgatttcttcacccatgtcgatcaggcgtttgtataaatcttccgcactgacgtgatggttatctggttcctgaagaacttccagaatttttaaacgaggaagcgttactttcaggccagccttctttaatgcggtattgttgtcagtcatgcggaatctgtcctgttgctaaacgattcacttcattagagaagtgacagaaattgcactcaagataatgcgtatcattataggactgccatgccgaaatgaaaaccgcaagtctctcgcagatgttaataaaactgtggttttgcctgcaaattctggcgccacctgattacacccggacattgtacagggatgggtgcgaaagttacaaatttgtagcaattattttgattggtcttgtctattgatgcggcgcagatataacgctgcgccgcataagattaggcgttgaggatgtcgtcgaggtgcaattcagccgaaacttgcttaacccatttttcaacacgctcggcggtcagttcaggctgacggtcttcgtcaatcgccagaccgacaaaatgatcgtcgtcagccagacctttagaggcttcaaaatgatagcctgcggttggccagtgacccacaatcgtggcgccgcgcggctcaataatgtcgcgaatcgtgcccagcgcatcacagaagtattccgcgtagtcttcctgatcgccacagccaaacagcgccaccagcttaccgttaaagtcaatctcttcgagagtcgggaagaagtcatcccagtcacattgcgcttcgccataataccaggttgggatgcccagcagcagaatgtcatacccttccaggtcttctttactgctttttgcaatgtcatgcacatcggcaacgtctttaccaagctgtttttgaatcatttttgcgatattttcggtattaccggtgtcgctgccgaaaaagatgccagtgattgccatgagtaaaataacctcttgaaacttattgaaatggtggtggcgaattgcccacggataagggcaatcatagcagaacaggcagatatgcggaaacagcaatcacgcgggactgcacgctctgctacacgaaatatgaaacaaaacttattttcagactaaaccctagccgcgcagcgccataagctgcttcattaatatttcttcaatgagctcgctgcggctaatgttgcgcgcttcggccagctcattcagcgcgtcaaccgcttgtgcgttgagttttaattcgacacgcttgaggccacgaactttgtcgcgttttaactggttgcgcttgttgatgcgtaactgttcatcgcgcgaaagcggattcgttttaggtcgtcccgggcgacgctcgtgcgcgaacagatctaatgtcgtacggtccgtttgttctttggccatgattttggtgacttcgggggaaacaatcagccaggcttatgcccggatggatagcgcgccatcatacatcagcgaggaagcgacgccaacgcccgcgcgcgtaatcgcgcacaggcgatgagtttttaatcagttagcgtttatcgtgcagataacggcggatggcgcgcagaaccgcctctggtttttcggcatgtacccagtggcccgcgccggcgatcacatgcgcgcgcgccaaagggaattgtgccagtagcgtgtcgcggtacgcttcggtcacgtacggcgagttaccgcctggaataaacagcgccggatgttcccagggcggaatggtttcccagccgacgatatgcggatactgctcccataataccggaacattaaaacgccattcgccttcagcccaggattttaacagaaactggatcacgccttcttcgttgaggtgctggcgcataatccctgccgcctgttggcgggatgtcgcgtcggattcgctgacggcgttaatggccgcgaaaatgcgatcgtggcggcgaacgtgataatccacgggggcgatatcaatcgcgaccagacgatcgatgcgatcgggcgccagcgccgtcagcgccattaccgcttttccacccatggaatgaccaataaacgtcgctttttcaatctgctgcgcgtcaagcgtatccagaagatcctgggccattgccggataatccatgaccggatcgcgcggcgataaaccatgattgcgcatatcgacctgaataatgtcgtgatcggtcaccagatcgcgcgccagtacgccgaggttgtccaggctgccaaacaggccatgaacgagaacgatgggggaattattgtgcaggttttgtgcagattgcgctcggatgtttaatttcatggcaaagttctttttttcgctctgtcgggttagggtattatgttgaccattctgccactgggctgcaacctctaaggtttactccgagtttttttgtcagccgggcttaacgctatccgctgttgggatttgttcctataatcccaatgacttgtattcagcaaagacatcgcactggattaagatgaaaacgattgaagttgatgatgaactctatagctatattgccagccacaccaagcatatcggcgagagcgcatccgacattttacggcgtatgttgaagttttccgccacgacacagccaacggcttcagcggtgaaggggacgcctgcggcgcaacccgttgccgaagcgaaaccggttaacccggtaaaagacaaagttcgcgcgatgcgtgagctgttgttgtctgacgaatatgccgagcagaaaaaagcggtcaaccgctttatgctgattctgactacactctattcactggatcaccacgcgtttgcggaggcgacggagtcgttgcatggccgcacgcgcgtctattttgcggcggatgaacaaacgctgctgaaaaatgggaatcaaactaaacctaagcacgttcccggcacgccgtactgggtgatcaccaacaccaacaccggccgtaaatgcagcatgatcgaacacatcatgcagtcaatgcaattcccggcggaattgattgaaaaggtttgcggaacaatttaatccttgcattagaaggaccaggcaatggcaatccacaaccgcgcaggacaacccgcgcaacagagtgatttgattaacgtcgcccaactgacggcgcagtattatgtactgaaaccggaggcagggaatgcagaacatgccgtgaaatttggcacttccggccatcgcggcagcgcaggtcgtcacagtttcaacgaaccgcatattctggcgatcgcccaggcgattgctgaagagcgggcgaaaaatggcattaccggcccctgctatgtggggaaagacacccatgcgctctcggaaccggccttcatttccgtgctggaagtgctggcggcaaacggcgtagacgttatcgtgcaggaaaataatggctttacgccaacgcctgccgtgtcaaatgctatcctggtccataacaaaaaaggcggcccgctggctgatggtattgtcattacgccgtcgcacaacccgccggaagatggcggtattaaatataatccgcccaatggcggcccggcggataccaacgtcactaaagtggtagaagatcgcgccaatgcgctgctggcgggcggcctgcaaggcgttaagcgcatctctctggatgcggcaatggcctcgggccacgttaaagcggtagatctggtacagccgtttgtcgaagggctggcggatatcgttgatatggcggcgattcagaaagccggtctgacgctgggtgtcgatccgctgggcggctccggtattgaatactggaaacgtatcgctgagcattacaaacttaacctgacgttagttaacgatcaggttgatcaaaccttccgctttatgcaccttgataaagacggcgcgatccgtatggattgctcctccgaatgtgcgatggcgggtttgctggcgctgcgtgacaagtttgacctggccttcgccaacgacccggactacgaccgtcatggcatcgtgacgcctgcagggctgatgaacccgaaccattatctggcggtcgccattaactatctgttccagcatcgtccgctatggggcaaagacgtggctgtcggtaaaacgctggtctcttccgcgatgattgaccgcgtggtgaatgatttgggacgcaagctggtagaagtgccggttggcttcaaatggtttgttgacggtttgttcgacggcagctttggtttcggcggggaagagagcgcgggcgcttcgttcctgcgtttcgacggtacgccgtggtctaccgataaagacggtatcatcatgtgcctgctggcggcggaaatcaccgccgttaccgggaaaaacccgcaagagcattacaatgaactggcagcgcgttttggcgccccgagctataaccgtctgcaggcgagcgcgacctccgcgcagaaagcggcattgtctaaactgtctccggaaatggtgagcgccagcacgctggcaggcgacccgatcaccgcgcgtcttaccgcagcgccgggtaatggcgcatcgattggcggcctgaaggtaatgaccgataacggctggttcgccgcgcgtccatccggtacggaagacgcttacaagatctattgcgaaagcttcctgggggaagaacatcgcaagcagattgagaaagaagccgttgaaatcgttagcgaagtattgaaaaacgcctgatgggcgatatggaagaaaaaggagccttacggctccttttttgtattaacggcgctgcgcttatcaggcctgtaaaccgcctccaggccggataaggcgcttgtgatatctgacttattcgctctgagtcgccagatgtcggcggcaggtgagggcgtcgcattcgatacgcaccacgcaaaccgctttcatcatatcttcccgataactgaaggtttttcccggatcggtctgacgcataatgacgtccaggccgtagcgcatctcctcgcgcgtttgcaatatcgatgccagtccggtggcgaaaacgctggtgtaggcgtagctataatcacaggggtcatcggcacgtagtaatgcatggtcgccgtccatttcaatgcatactgccgggttcttacgtaacagacgcatctttttcccggtgcgtgcgccgtgaaaataaaatatccagcgtccgttctgatactcgtagccaaaatttacggggacaacatacgggcagagattgtcgttaaaccctatccgacacacttcgtgtttactgagaatagccagtatttctgctatatcagtgacttcccgctctggattactcatttctattatcttattcaaagagtgaaaatgcccggactaccgttaccgcagcccgggcgcgccatcagccgtgtttatttttcaattcaaaacgcggtgagaccaggccgtataacgtccagccgaggaaggtcacaattgagccgtacagcatggcttcttcaccggaggaatagagcgcgtagaagctatacatggcgccaacgaaggccacgaagttagcgactttcgcttttgatgacggcacattcgccattttctgaatgataaccagcgcggccatcgacagaatatacggaataatgttcgtcaccaccgccaggttaaccaggacgttaaactgactattcagcgacgggctaatggtcatcagcgacaggccagtctgaataatcacaatgatcaacatcccctgaaccggcgcgtcgactttcgttacacgagagaagactttcgggaaatagccttcgtcagcggaggatttaaagacctgagcgatagtgaactgccagcccagcagcgagccgcagcaggacattaccatcagcgccatgatcactttacctaccgcaggcgtgaacatctgtgcaaacgccagaccaaacggcgccgtggagttcgccagatccatgttcggcacaatcccggcaatcacgttagtcgaaacgatatagatgaccgccgcgcccagcgtaccgcccagtaccgcaatggggacgttcttttccggattctcgaccacgtctgcgttggcgcaggcggattccagtccaagaaatgcccataacgtcatggcgatggaagaaccgaccgcgctaaagaacggaacatggtgcgggttccatgacgctacgtacatgctggggctaaaccagaaccagccaatgatgcacaggccgacaaccggaatgatgacgccccaaacggtaacgctactgatctgtccggtaatacgcgcgccgccaaagtttgcgatggtacaaacccacaatacggcgatagtcgccagaccgatctggagcggcgtcagcgcggcgccgaacagttcggtaccatagccgacagcggagatggcgatagccacgttggcgatcagcagcgagacgccgtaggtatagttcgccataaagttgccggatttaccgaaggcatattcggcgtaaccgcccatgccgccggatttacggctaaacataccgcatttcgcaaacgcccaggccagtgccatcgagccgacggcggtgaccagccaggagataatggatatcgtgccgacttcagacagtttggtcggtagcatgatgatcccggagcccatcatgttgaccatagtcagaattgtgagctgcacgacacccattttattggatttaggtttactcataatttttcctccttcagcagggagcgctgtgcgtcacgaggtttaatgacgtagcaccagacctgcttacggccgtcgtgttcttcgatataaacgccctgcagttcaggcgcaaagcccggcagcaggttgatcccttcttccagggcgctgaagtaacgcaggacagaaccgccccagatttcacccggaactacacacagcactcccggcgggtaaggcagagcgccttcagccgcgatacgaccttccgcttccggcaggcgaaccagttcgacctcgccgcgcagataggcatagttggcctcttgcggattcatactgactttcgggaaatgcgatttacggaacatctctttttgcagctgtttcacgttgtgccgcgcatagagatcgtgcatctcctggcaaagctgacgcagggtatagccggcataacgcgcttcatgctgtttgtagatggacggtaatacttccgctaacggcgcatcagcttccagcagtttttcgaaacgagccagcagggcgacaagctgttgtaacttcgccatgtcttctgccggcgtcagcaggaacagaatggagttgaggtcgcatttttccggcacaacgccgttctcgcgcaggaagttggcgaggatcgtggcaggaacgccaaagtcttcatattcgccgctcgctgcattaatgcccggtgtggtgagcagcagtttgcaagggtcgacaaagtactgatgttcggcatagccttcaaacgcatgccagtgttctcccggaacgaagtggaagaagtgcagatcgctggcgatctctgacgtcgggtatgactgccacggcttaccatcaatcagttccggtacgaacggacggatgtgatgacagttttcgaggatcaatttacgggcatcgatgccgttaaccacgcaatccatccacatattgcgaccgctgacgccttcgtgcattttggcgttaacgtccagcgcggcgaacagcggatagaacgggctggtggaggcgtgcatcataaaggcgttgttcatgcgcttatgcggaacgtagcgcgattgccctttgatatggctatcttttttatggatctgcgaggtctgggagaaaccggcttgttgtttgtgaacggactgcgtcaccagaatacccggatcgttttcgttcagttccagcagcagcggcgaacaatcggccatcatcggaataaattgttcatagccgacccaggcggagtcaaacaggatgtagtcgcacagatgaccaattttatcgacgacctgacgggcgttataaatggtaccgtcgtaggtgcctaactggatgacggccagacggaatggacgtgcttcgcgggcacgctgcggcgcgacttcgctaatcagctcgcgcaggtaatcttcttcgaagcagtgagcgtcgatcccgccgataaaaccatacgggttacgcgcggtttccagataaactggcgttgcgcccgcctgcaataatgcgccgtggtggttagatttgtggttgttacggtcaaacagtaccagatcgcccggcgttaacagcgcgttgagtacgactttgttagaggaggaggtcccgttcagcacaaagtaggtcttatcggcgttaaagactttcgccgcatgttgctgcgcaatgcaaggcgcgccttcgtgaatcagcagatcgcccatcgccacgtccgcgttgcataggtcggagcggaagagcgtttcgccaaagtattccacgaactgattaccggcaggatgacggcggaagaattcgccgccctgatgccccgggcagtcaaatgcgctgttgccctggttgacataatccaccagcgcgcggaaaaacggcggacgtaactgcgtttcgtagtggcttgctgcggtttccaactggcgaccatagaaggcagtacgggattcattatattcgaatacaccagagatacgcggcaaatactcaggcggtacgcgcccttcgtcatgtgtcgcgacaaacacgggaataccgtaacccgttgcgtcgatttcatcgagttttccgtgttcaatgtcgtcaatggataacacgatggcagccacgtcgatgaaacgactctcatcaacatttacaatattacggtgtgtagaaaaacaatccgggcaatgacggctaacggcaatttttaattctgacatttttcatctctttatttcaggtaatagcaggccctcaatttctcgcatgagaaactgattcttccggaaaaaatcaaagctatcccgctgataaaaaaatcagtaaattagctttattttagatgtaataaatcccaacccgtccggttgcaggaaattcaggatttaaggagttgagtactacgatatacaggcagaaaccgcgataactaaaattgcgctgagtcggaatttcttctgtcaaaccacatggttagctggctgggcgtaaaggaattaccgtactgtcgcttttaacaattcgagttatttaggcaatagacctgaatgacataagggtcggaaagacctgtatgctgaagtacccgtagcagaaaaactaccgggcattaaagaaatgaaagtcgaaactattgcggtgggcaaacatcataatatgcgttgtccgccttatatggggcataaaacgattattattttccattttgaggtcctttcattgatttattgaaagcatggatattttatccaggaagcgccagcaatctgtgaaccagatcaacaaaaaacgatcatttgaaaaataattagtcggcgattatgcatatcgtgctgtgaaataacggattgtttcttaaatgttaattatatgttttttatatcctctataaaatataatatcgccgcgaaaataattattcgcgacgccgaaaataaatgacataaaaattagaagttatttaaaaataatgaatagctattcacggcataaagcgatagccaattccggtttcggtaataaaatggcgtgggcgggtgggatcttgttccagtttctggcgtaaatgtcccatatagatgcgcaaatagtggctatgctccacggcgttaggcccccagacctggtttaataactgccgttgggttaatactttgccggtattattgagtaataccgccagcaggcggaactcaatcggcgtcagatggatttcttcgtcgccacggtggatcaaccgtgcggcgagatcgaccgtcacgccggaaaagcggacgatcggatcggcgcaagggctggcggcgtgccgtcgcagcgcgacacgcaaacgcgcctgcagctcgccaatgccgaatggcttgctcaggtaatcatcagctccggcgtcaagcgcggcaatcttatcgctttcttcgctgcgggcggaaaggacaatcaccggtattgcgctccattgacgcaggtcgcgaataaaatcgattccgtcgccgtccggcaggccgagatcgagaataatcagatcgggctttcgcgtggcggcttccagtaaaccacgttgtaatgtttcagcttcatacacgcgcaggccgtcgccttccagcgcggcgcgcagaaagcggcggatggcctgttcatcttcaacaatcagaacgtttgtcacatatcctcatgaaaatcatcaagttcaggtggctttccttgcggcagcgtcacacggaaacaggcgccgccctgcggtcgattataggcggtaagcgtgccgccgtgtacctctacgatagcatggcaaatcgccagccccagccccacgccggggacggcggactctttgttgccgcgggcgaacttatcgaaaatcttctgttcttgccccgcaggaatacccggcccgttatcccagacatccagttgtaaacgatcgtccttaaccgcagcatcaatgccgatactggcctgcggcccggcgtacttaacggcgttttccagcaagttgatcaggacgcgctcaaataaggggccatcgacatggataagcgttaactgttgcggcagcgacaatgtaatcggatgcaataaacccggctctaacatctgtaacgcgctaccgacgacctcttccagcgtcagccactcttttttaagattaaacccgccggactgaatacgcgccatatccagcaaattattcaccagccgggtggtgttgagaatatgctggcggatttcactggcctgacgcgcgtggggcgatcctgcgctggctaaatccagcgtcaaaatttccgcctggccgaacaataccgtcagcggcgtgcgtaaatcatgcgacagcgccgccagcagagcgttgcgaatactttcgcgctcgctggcgagacgcgcctgttcttcgctggcggtcagcgtcagtcgttccagcgcgttggcgacaagcagagtaaatgtttccagcaggcgttgctgctccggcaccattaactgacgcaaattacccggttcgacgatagccagaccgtacgttttatcggcgcttttcagcggcaggatttgataaggcacgccagggagggtatcggtgcctgcgccggcaggctggcctttatcaaaactccagcgcgcaattgcgtcgtcccacggcgtcatgccttgctggtgggtgagaggcagcaacttaccgttagcatcaggtaacaaaatttggctgcgcgcctggaacgtcgaggcgataaaccgctcgctggtcgcggcgatatcatgttcgctacgcccgacggccagcgctttagacatttcatataaatggcgggtacgctgttcccgataacgggcgacgcgcgcctgatagcgcaccccggcagtaagattgccaatcaccagaccaaccgtcagcatcacggcaaaggtcagcaaatactgcacgtccgaaacggcgagcgtaccgcgtggcgcgataaaaaagagatcgaaactcgccacgttaatcaccgtcgccaccaccgacggccagcgtccgtaaagcagcgcaatcaccactacgcccagcaaatagagcattaccagattggcggcgtcgaaggtgacaagccactgcatagcgataagcgtggtgatggcgcaaagcgccacggcgaccagacagccctgaatctgcccacgccatttctctttaaaaggtcggttatcaggcgtttgcgccaatgcgcgggctggcggctcttccagcgcgacgatcacctgatcgagatccggcgcgcgcctggcaagacggtcggcgaaagcgtcacgtcgccaccagcgtcgcgacgccgggcggcccatgacgattttccccagattatgctcgcgggcatagcgcacgaccgctttctcttcggcgggatcggacagggtggcggtttccgcgccaagctcctgcgccaggcgcagcgcgcttaaaatagcccgccgttgcttttccggtaagcggtgtaacgttggcgtttcgacatagacggcgtgccagacgctgccaagccgggaggccagacgcgccgcggtacgcaccagtttttcgctgccggtgttatgcccgatacacagcaaaatcgcatcgcgggtatgccatactttttcttcgcccggatgcgcgcgccaggcgcgcatctgatcgtccacgcgatcggctgtccggcgtaacgccagctcgcggagggcgatcagattgcccttgcggaaaaaatgttcaatagcgcgttccgcctggccggcgatatacactttaccttcgttgagccgttggcgcagatcgtcgggcggcagatcgaccagtacgacttcatcagcggcatcaaaaaagggatcggggacggtttcgcgcacctgaattcccgtgacgccgctcaccacatcattcagactttccagatgttgtacgttcacggtggtgaaaacgtcgattcccgcttccagcagctcttcaatatcctgccagcgcttaggatggcgtgagccaggcgcgttactgtgcgccagctcatccattaaaatcagcgccggacgccgggcgagggcggcatccaggtcaaattcgcggatttgccgcccccggtgcgagtgacgttttggcggcagaatggtcagcccgtcaagtagtgcggcggtctctttacggccatgcgtctctaccacgccgatcaccacatccagcccctgcgctcgcagccgctgcgcttgcgccagcatcgcccaggtttttccgacacctgcgcaggcgccgaagaaaattttcaacttcccccggtggggcgggggcgtttgttccaacaagcgatccggatcaggacgcaagggttcgtcgttcatttcgctctgtgtccctgtagcgcatccagcgccagattaagctcaacaatattcaccaccggttgcccaagaaagcgcgccagcggcctgtgcgtatattctgcaaccagttgcgcgacctgttcaacgggaagctggcgagccgccgctacgcgggggatttgccatgccgcggcgccgggcgtcagattattatccagcccgcttgccgaggccgtcgccagctcaaccggaaccgcggaactcgcctgggggttagcggcgcgtagcgcggcgacgcgggcctgtatttgcgcatccagttcgggattgctggcggccaggttgcttccgcccgacgccagtggattataaggcgtatcggcggtggcggagggccggccatgaaaatagcccgcggcggtaaacgattgtccgataagcgctgagccgcgtatcacattgtctttatgaatcagcgagccattagcctgccagggaaaccaccactgccccagcgccgtggtcagaagcggatacacgccgccagtcaataacagcagaaataacattgtcgaaaaagcaggacgtaaaccgatcatcatacacctcacgccagacccagcagggtcagcagcacatcaatcactttgataccaataaacggcaccaccagaccacccagaccatagatccataaattacggcgcagcatggccgatgcggaaagcggcttataactcacgccttttaatgccagcgggatcagaaaaataataatcagggcgttaaagatcaccgcgctcagaatggcggagttcggcgaatgcagccccatcacgttgagcgcgtttagctgcggataggtagcggcaaacgcggcgggaataatggcgaaatatttcgctacatcattcgcgatactgaaggtggtgagcgagccgcgcgtcatcagcatctgcttaccgatatgcaccacttcaatcaacttggtcgggttagagtccagatccaccatattaccggcttctttcgccgcctgggtgccggagttcatcgccaccgcgacgtcagcctgcgccagcgccggggcatcgttagtgccgtcgccggtcatggcgaccagccgtccttccgcctgatattgacggatcagcgccagcttggcttccggcgtggcttcggcaagaaaatcgtccacaccggcttcggcggcaatcgctgccgccgtcaggcggttatcgccagtgatcatcaccgttttaatacccatctttcgcagctgggcgaaacgttctttaataccgcctttaacgatatccttgagggcgataacacccagtacgtgcgcgccctccacgaccaccagcggcgtcgcgcccaggcgcgccacgttctcgacgttttgctcgacatcggcgggaaaatggccgccattgctctcgacatgacgccgaatcgcgtccaccgagcctttacggatcatccggttatcgatattaatcccgctcatgcggctttgtgcggtaaacggaacaaaggtggcatgaagcgactgcacatcgcgttcacgcaggttaaagcgctgtttggcgaggatcacaatgctgcgaccttccggcgtttcgtcggccagcgaagcgagctgcgcggcgtcagccagcgtgcgttcgtccacccctcgggcgggaataaaatcggacgcctggcggttgccgagcgtgatagtgccggttttatccagcagcagcacgtcgacatcgcccgcggcttctacggcgcggccgctggtggcgatgacgttcgcgcccaacattcggctcattccggctacgccaatggcggagagtagcccgccgatggtggtggggatcaggcacaccagcaacgccaccaacacggtgacgctgaccgcgttaccgccccaggcggagaagggccacagggtggcggtcgccaataaaaagacaatggtcagggcgatgagcaaaatcgtcagggcaatctcgttaggcgttttccgccgctgcgcgccttccaccatcgcgatcatccggtcaagaaaggtttcgccaggattgacgctacaggcaatcaccagccagtcggaaagaattcgcgtgccgccggtgacagaggcgaaatcgccgccggactcgcggatcacgggcgcggattcgccggtaatcgcactttcatccaccgaggcgccgccttcgatgacctcgccgtcgcagggaataatatcgcccgctttgaccaggacaatgtcgcctttccgcagttcagcggcgggcacgttatcggcctgcgcatcatggcgaggggcgcgcaggcggcgagcgaacgcggtctttttcacccctttcagactgtttgcctgggctttgctgcggccttccgccagcgcttcggcaaaattggcgaacagtacggtgaaccataaccacaggctgataatccctgtaaacaaggcgcttcccgctatttgtcctgttaccatagcgagcgttaacagagtggttagcacgctgccggcccagaccacaaacatcaccgggttacgccactgggcgcgtgggcttaatttttttacggcatccgttagcgcctgtacgagtaaaacaggttcaaacagcgccagttgcttgcgactcatatcaatgtactccacatcgctcaaggtaaagagaaatgctccgctaccgggccaagcgccagggcaggaataaatgtcagcgcgccgaccagcagtaccgtgccgatgagcagtccaataaatagcgcgccgtgggtcgccagcgttccctgactggccggctgtacttttttactgaccagcgagccggcgatggccatgacaggaataatcacgccgaaacgtccgacgaacatgcagaatgccagcaaacagttccagaaaggcgagttagcgctcagacccgcaaaggcgctaccgttgttgttggcggcagaggagacggcatatagcacttcgctaaaaccgtgcgggccagggttcagcattgcgctgcgtccggcatccgtcatcatcgccagcgccgaacccaacaagaccagcatcggcgtgaccagaatcgccagcgcggtcattttcatttcgcgcacgtcgatttttttccccagatattccggcgtgcgaccgatcatcagccccgcgataaacaccgccagcaggacaaacagcaacatgccatacaggcctgaaccgacgccgccaaagaccacttcgccaatttgcatcagccacatcggcaccataccgcccagagcggtaaacgagtcgtgcatggcatttaccgccccgcaggacgccgcggtcgtgacgacggcaaacaggctgctggccagcacgccaaagcgtgtttctttaccctccatgttgacgctactgtccgcgcctgccgccaacagatgtggatttccctgaacttccgcccacatcactaccgctacgcagaccacaaaaatgaatgacattgcccacagtagcgcgcgtccctgacggcgatcgcccgccgcttcgccaaaggcgaaacagagcgcggctggaatcaaaaatatcgccagcatctgcgccagattagtgagcgcggtggggttttcgaacggatgcgaagagttggcgttaaagaaaccgccgccgttggtgccaagcattttgatcgcctcctgcgaagcaaccggccccatcggcaagagttgtttagcgccttcaagggtggtgatgggctgataagccgacaggttttgcggtacgccttgttggataaaaaacagcgcgataattaacgcgacaggaaataatatccatagcgtaatgcgtaccagatcctgccaggcattacccagcgtgtgcacattctggcgcgtaaaggcgcggataagcgcaaaaaccaccgcaatcccggtcgccgccgacaggaaattttgcaccgtcagcccggccatctggctaaagtagctcagcgtgctttcgccgctgtaggcttgccagttggtattggtgacaaagctgacggcggtattcagcgccagatccccggacagccccggtagccgctgcggatttaagggcagccactcctgccagaacaacaggcaaaacaggatgcccagtcccagcagattgagcgtcagtagcgccagtaaatactgacgccagttcatttcgtggtcggtaatgccaagagtccgccagaggatacgctcaatgccagccacgcccggcaacggaacggcggcgatgagccttgccaggcccgaacccaatggtttcgccagtaccaataaaatcagtaaaaaactggcgatcagtaaaaatccttgcgcggccatcagaacgcctccgcattaatcagggcatagaccagataacctaaaagtaagaaaaccagcacgatgccggttatcacgcctgcactcacagagcacctccagtggcattgttttactcctgagaaaggtaattttttggctgcaaagatttcgcaaaaattggcgggcggagtgtaaaaaaagtataaaaatggcaaagaccattatttaactaatgattagtattaatttaacctttttgtaactaatttacgctttgaatgtaaatctgctggaaaagcgtgaaaataagtggtcggatgagtagtaaaattacaccgaaagcggtactattttaatcaggtaacgaggttcaatttttcggtgctattcaccgattcaatctataccggggcgggtagcgtcggtataaaggggggaaacgtatggaacactataaagactatccagcgcatgtcatttttgtccgtcgtgctttcgcggtgatcgcaggcgtgctggcgctgccggtgatgctcttctggaaagaccgcgcgcgtttttatagttatctgcaccgtgtctggtcgaaaaccagtgataaaccggtatggatggcgcaggctgaaaaagccacctgcgacttttattaatcgcgaccagcctgaaaaaccgtcagccgccacgctggcggtttttttatgcgccagggtctacactgtttaacgctattcgccgtgacgtttcatctttcaggagttgtatgcccacccatttagtctggttcaggcgcgatctgcgtttacaggataaccttgcgctggccgccgcctgccgcgatgcatccgcgcgggtgctggcgctttatatttccacccccgcgcagtggcaggcccatgatatggcgccgcggcaggcggcattcatcagcgcgcagctcaatgcgctacagacggcccttgcagagaaaggcattccgttgctgtttcatgaagtggcggattttaacgccagtattgaaacggtcaaaaacgtttgccgacagcatgacgtcagccatctgttttataactatcagtatgagtttaacgagcgtcagcgtgatgcggcggtggaaaaaacgctgccctctgtcatctgcgaaggctttgacgatagcgtgattctggcgcccggcgcggtgatgaccggcaatcatgaaatgtataaagtttttacgccgtttaaaaatgcctggttgaaacggctaaaagaagatatcccgccgtgcgttccggccccgaagatccgggtgagcggcgcgctttctacacccttaacgccagtctcgcttaactacccgcaacaggcgtttgacgccgcgcttttcccggtggaagaaaacgcggtcatcgcgcagctacgtcagttttgcgcgcagggcgcagacgagtatgcgttacggcgcgatttccctgcggttgacggcaccagtcggctttccgccagcctggcgacgggcggcctgtcgccgcgacagtgcctgcaccgattactggcggagcagccgcaggcgctggacggcgggccgggaagcgtctggttgaatgagctcatctggcgggaattttaccgtcatttaatgacctggtatccggcattatgcaaacaccagccgtttatccgctggacaaaacgcgtcgcgtggcaggaaaacccgcactattttcaggcatggcagaaaggcgaaaccggttatcccattgtcgatgcggcgatgcgccagcttaacgcgacgggctggatgcataaccgtttacgcatgattaccgccagctttctggtaaaagatctgttgattgactggcggttgggggagcgctatttcatgtcgcagcttattgacggcgatcttgccgccaataatggcggctggcagtgggccgcctcaaccggtactgacgccgcgccttattttcgtatttttaatcccacgactcagggagagaggttcgatcgcgacggcgaatttatccgccagtggctaccggcattacgcgatatccctggaaaagcgattcacgagccgtggcggtgggcggaaaaagcgggagtcgtgcttgattatcctcggcctattgtggagcacaaacaggcgagaatcgcaacgctttccgcctatgaggcggcgagaaaaggggcgtgatacaggcccggtagcgcaaactaccgggcattctgctatcaggattcgacggccagcgcgcggcttttgaatttgaaggactgatacagccaaatcagcaggacaacccctacgcaggctaacgcgccccaggtgatctgttcaaaaacatccacataggcgttgatggcgtaattaaccgcgccgctggcgtcgaaggcgctttgcgaggtctggtcagcgatgacgcctgccagatagttagctatcgcgccggacagcagcatataaattccggttaatacgccggtgacgccggggatatcaatgcgcgtaatttgcgacatggcgaccgggtcgataaatagctcggcaaagcccatcaccgccagtcccagcaccattagcggcattgaagagtgtccgtaagcggcggaccagcgtgcgctcagggtcagaatacagaatccggcgctcatcagaccgagacccagcgcgaatttgccccagatacgcacggtgcgattaccgcttacgctctctttaaccagccaggccaggacgaccccacacagcatcacggcaaaggcgttcaccgactggaacatggcggtaggaacggaatagcccagaatatcgcggttcacaaagcggtcgatatacaggctgatagaactgccgccctgctgggcaaacgcccagaacagcatactgaacagggtcagggtgacaatcagccccagttctttgcgctgtttggccgtttgcgcctggcgataaatttttgccagcacgaccaggccgatcgcggtcgccacgattaaggcatagacagaccattctttccagaacagaacggtaatcagcaacggcgccgctaccagcaaaattaacagccagccccagttcggcagcaggtagtttctggcgcacaacacggctttattcacgccggtggtgtgggtgaaatgacgatttccacacaggaagatcactaaccccgcaagcataccaatggcggcgagcgcaaagcccatcgcccaactgtactcctcttgcacatagccgcaggcgataggcgccacgatcgaaccaatattgcccgctgcgtaaagcagcgagaacccgccgtcgcggcgcggatcttccggctggtacagttcgcccagcaggcagctaatattcgatttaaacaggccgtagccgcagacaatgatcgccagcgacagataaaggaatgtcggcgcgatctcactggcgcccagcactaaatgacctatagccattaaaaatgcgcccagcatgactgccattcggttgccaagcaccttatccgccagatagccgccaagaatcggcgttacgtagaccagcgaacaataagcgctgaataactcataggcgtggttatcgtcgtattttagctgattggtgagataaagaatcagtagggcgcgcataccataaaagctgaagtactcccaaatttgcagggcgacaacgtagtaaatagcgcggggttgagatgcttgtttattcatcgtatttccgggatagaggcactgcggcaagaacgcggcattctcagataatgcctttctttgtgggcttattaagcctgccgtatcgccgtgtttccttaaagttaccaacatgatacagaactgattttttctgcaatatgcgttctgattgcataaatatacatgaaaccgatcgtgttttgctaagtaatttgcgccaaacccggaggtgattgtttcttgatgtgtcaaacaaatgtttatcgacgaacggctaacggaaggctatgttaacggagactgaacccgtaacgggaaagtagaacgtgggttaaagggagcgatgatgaaaaacaccgagctggaacaactgattaacgacaagctgaacagtgcggcaataagcgattatgcgccgaatggtttacaggtcgaaggaaaagagacggtacagaaaatcgttaccggcgtgaccgcaagtcaggcgctgctcgatgaggcggtgcgtttgcaggccgatgcggtcattgttcatcatggttacttctggaaaggcgagtctccggttattcgcggcatgaaacgccgtcgcttaaaaacgttactggcaaatgatattaacctttacggttggcatctgccgctggatgcgcaccctgagctgggcaacaatgcgcagttggcggcgctattgggcattaccgtgaaaggagaaattgagccgctggtgccgtggggagagctctcaatgccggtgccagggctggaactggcctcatggattgaagcgcgtctggggcgtaaaccgctatggtgcggcgataccgggccagagaatgtgcagcgtgtcgcctggtgtaccggcggcgggcaaagttttattgatagcgccgcccgcttcggcgtggatgctttcattaccggcgaggtgtctgaacagaccattcattccgcgcgcgaacaggggctgcatttttatgccgccgggcaccatgccactgaacgcggcggtattcgcgccctgagcgaatggttgaacgaaaacacggcgttggatgtgacgtttattgatatccctaacccggcataactgagaggcaataaagtgcagcgagcgcgttgttatctgttaggcgaaacggcggtcgtcctggaacttgaaccgccgattacgctggcgagccagaaacgcatctggcgtctgacgcagcgtctggtcgatatgccgaacgtggtggaagccattcccgggatgaacaatatcaccgtgatcttgcgggaaccgcaaaccctggcgctggatgcgattgagcgtctgcagcgctggtgggaagagagcgaggcgctggaaccggactcgcgttcggttgagatcccggtgatctatggcggcgcaggcgggccggatctggcggcggtggcacggcacagcggtttgagtgaaaagcaggtcgtggagctacatgcctccgttgagtatgtcgtctggtttttaggctttcagcctggctttccctatcttgggaatttaccagaaccgctccatatgcccagacgcgcggagccgcgcctgcaggttccggccggttctgtcggcatcggcggcgcgcagacggggatttatccattatccacgccgggcggctggcagctgatcggcctcacgccgttgaagttattcgatccgatgcgggagaccccggttctgctacgccctggcgatagcgtacgctttgtgccgcaaaaggagggaatatgctgaatattattcgcgcggggatttatacctccgtgcaggatagcgggcgtcacggctttcgtcagtcggggctgagtcactgcggtgcgctggataaacccgcctttcagaccgctaatctcctggtcgggaacgatgcgaatgccccggcgctggaaatcactctcggtcaactggttgtcgaatttgaaaatgagacctggttcgctcttaccggcgcaggctgcgaggcgcagttggatgatcaaccggtctggaccggctggcgattgccggtaaaagcgggtcagcgtcttacgctgcatcgtccgcttcacgggatgcgtagctatctggcggtggcgggcggtattgctgtgccggaggtgatgggatcgtatagtaccgatctgaagtccggcatcggtgggctggaaggacggctgctaaaagatggcgatcggctggcgacgggtaaaccatcgcgacagtttagcgggccgcagggcgtgaagcagttactgtgggggaatcgcatccgtgcgctaccggggccggaataccgtgagttcgatcgcgcctcgcaagaagcgttctggcgttcgccgtggcagctcagtccgcaaagtaatcgcatgggctatcgtttgcagggacaatcgttaacgcggacaacggatcgcgaactgctgtcgcacggtttgctgcccggtgtcgtgcaggtgccttacaacggccaacctattgtgttaatgaatgatgcccagacaactggcggctatccgcgcattgcctgcatcatcgaggcagatatgtaccatctggcgcagatccctctaggacaaccgatccattttgtgcaatgttcgctggaggaggcgctcaacgcgcgccgcgagcgtcagcgctatctggaacagcttacctggcgacttcagcatgaacattgatttaaatgcggatttgggcgaaggttgcgccagcgacagcgaattattaacgctggtctcctccgccaatatcgcctgtggttttcacgccggtgatgcgcaaaccatgctgacctgcgtgcgcgaggcgctgaaaaacggcgtggcgatcggcgcgcatcccagctttccggatcgggataattttgggcggacggcgatggttttgccgccggaaacggtatacgcccagacgctgtaccaaatcggcgcgctgggggcgattgtccaggcgcaaggcggcgtgatgcgccatgtcaaaccgcacggtatgctctataaccaggcggcgaaagatcctcatctggcacaggcgattgcgaaagcggtacacgactatgatccgtcactgatactggttggactggcgggaagtgagctgatccgggccggtgagcgccatcgcctggtgacgcggcaggaggtgtttgccgatcgcggctatcaggccgacggtagcctggtgccgcgcatgcaacctggcgcgctgattcacgacgaagagcaggcgctggcgcaaacgctggatatggtacaagccgggagagtgaaaagcgttactggcgtgtggacgactgtcacggcgcaaacggtgtgcattcatggcgacggcgagtatgcgcttgcattcgctcgcaggttacgcgccgcgttcaatgcgcgtaatatacacgttattgcctgagagcccgacgattgaagctattatattacggctgctaaaaattatcgtgttctgttctcttaatgtcaggaagagggatttattcaatactatataaatccccttataatatattattttaaaaataaccaagtgatgctgtaatagccagtatgatgagcttattgctgttagcagcagagtttttgaaaatcattatgatattgttagctatcgccatctaatcaaacctccggggcgggtaaactacctgactctttattacccctttctgattgatttacctcacgatagcctcatttttagcatttatattcctcatcatgacgacttatcaggagattgaagccagattgattcgctgtttcactatcacgtcatggatagcgtgccagattgccagctatatggattttaagctgtttacgcatagcaacttttttagcgaaaattaaactcatctgatcagtgattttttagtatattactcattttgttatgatggatttgttttgtgaaaagaaaatatcttacgcaagaagagattgaaaaactgctgtcagcgaccgacagaatgcccttcccggaaagaaaccgctgcttaatcctgatggcgtttattcacggcttccgggccagtgagctgctggggctgcgcttgtcggatattgatcttgcaggaagacagctttatatccggcgcctcaaaaatggcttttcaacgtgtcaccccctccttcccgatgagtataacgtactgaaaagctggctcagggccaggaagtatcttgagaaaggggctgacggagactggctgttcctgtcgctacgacggcatccgctcagcaggcaacaatttttttacatacttcgtgaggcagggcggttggccgaattaacgatagcgccacatcctcatatgctgcgacatgcctgcggctacgcccttgctgataaagggattgatacacgactcatacaggactatctggggcacaggaatatccagcacaccgtaagatacaccgcaagtaacgccgggcgttttcatggaatatggcgaaaaaaacgtcgagtataaccgtacgttctgattcaaaaagttaagtccgcttcgcgctttcatcatcctctcagatttaccccttccacacaagagtcatacaatcgtaatctattgcttattaaggagttatccatataacaataaaaaaactaagggaaaatttacctggtccaaccagcactatgctgtatccatttttgtcctgcctgcacaaaatgttaattttaagtgttaaaaaaacgtattaaataatacttaatgctgattaattatcatatcaaagaattaaatcctttattttaccttttgaatcatattgttaaatcacagagaagtctgttcagggaaagctgatttacataatcaacatataaatcaatagattactgtgttttctatttgtcattttgtactccgcacagggcagaattaccctgcggcaggagcatgtactaccagggggactgacggcctgtgcagccgaaaagcagaaccggacagggtgtcagagagcagtgtttagatagggccagacgtcatttttcatacagacatggaatggctcccggtccacgaaagggtgcggacatgttgtttccacaacacgaagctgccgttgctggcgcagtgccgggtcggcaatggccagaggagaacaatctgatgacgcaagaatatgcggaaatgtccaccggaaggggggggaccagtaagtgccggtacagtatgggggcgaaaatatttttgctcctgctggcggtctccaccgtcgcagcgttgttcagcctgtaccaggttctgacgtactgatatgcagacgttaaccagagtactgccgcctctccggctgattatgttttgtcagtcaggcgaaaatcctacgcagtttccggataccggcggcctttgcgtggaggactgcgttcgtctcaggacaccagaagggctgctggatcggttgcgtcggtggcccggcgcgatggtgatatccgccggacggccatcaacccagcttctgctgtggcaacaggtttttctgcgttatccgcggacagtggttttttgcagcagtaacgcgtttttaccggttgacgtcagcgtggaaggttacttccgccatctgaggctgattaaacgcgccatgtcggtaagggttctggccagaatggctgagcttgccatatggtcatcactacagacatcgccttacgaggaggagatgaaaagcgcgttgagcgtgccggagctggtgatggagataaacagccgcacgctggtcaggttactgtcagagcgtctgccaaaacagggacggcgggtgctgggattactgttgtcaggctgtagcccggaaatgacggcccgtatgctgggaaccggcgtgaggcaggtctggctcgcggagcagacgctgaaacaacgctgggatatcccgacaggagtaccgctatctgatgcggtaagaataaggataccggacgtcggtccggacattagccaacagagtgggttggtaaaaactggggccggtaacgcaccggatttatgctgacagcatatttacatcatgccgcgcggtattcagacccataatgttgcgttctgaatgagttatcttcacaaaataaatatggcaatcatcgttgtccggaaataccgcataacatgtgacattaatgaatctgtaatcagtgcgagggtttacgcgctgtggcggtagcgtggaattatctggatgcgttgagtaaatttcactttacccttctgatataaatgaaaatggttctggataaactatctaatattatctgtgtctgcaaacagagtgacaaaaataatgcaacgtaaaaagatactaattgtaggtgcgggcctttcaggcgcagtaatagcacgccagttagccgagcagggacatgtagtcaatattattgatcaacgttcacatatcggtggtaacgcttatgatgcccgagatgagcacacgggtattatggtgcacgtttatggtcctcatatttttcatactgataatgaaactgtatggaattatgtaaataaatacgctgagatgatgccttatatcaataaggttaaggccacagtaaatggtcaggtattttctctacctatcaatcttcataccatcaatcaattttttggtgtcgcctgctcacctgatgacgccaggaaattactgcttcaaaaatgtgatagcaccattctggaaccacaaaattttgagcaacaggccttgcgtttcattggtaaagagttatatgaagccttttttaaaggttataccattaaacaatgggggcttcatccttccgcgttacccgcttctgtattgaaacgtatccctgttcgttttaattatgatgataactatttcaatcataagtttcagggaataccaaaatttggttatacacaaatggtcaagtccattgtcgaacacgaaaatatcgctgttgaactatgtcgctccttcactcaggaaatgcggacaaattatgatcatgtttttttcagtggcgcgctggatgccttttactcctgtcaatatggccgactggaatatcgtacattagactttaaaaaaataatttgccagagtgattatcaaggatgcgcagtaatgaattattgttcaatagatactccttatactcggattactgagcacaaatatttttctccgtgggagagacatgaagcttcaatatgttatcaagaatatagtcgggaatgtgaagctggtgatataccctactatcctgttcgcagggcagataaaatggatttactgaataaatatctgtcgcgggctaaaaaagaaaaaaatattactttcattggtcgtcttggcacttatcgttatctcgatatggacatcacgatagctgaagcattacagacggcggacgtatacttaacgtcgctatatgaacaaaaagaaatgccagcttttacagttaccgtttgatgaagtgtacagcgctaatcgtaacttttaaccgtcttgaaaaattaaaaaaaagtgtgcgagagactgttaaggcgggtttttcctctattgttatcgttaataatggctcaagcgacggtaccagggaatggctttcttcattaagtgaacctggcatcacgatacttaatcttaaagataatcttggtggtgctggcggatttaaagtaggtagtcaatatatatgctcatatagtaatgccgattgggtatttttctatgatgatgatgcttacccggaaattaatattttaaagcatttctcgttattagatacctcaagataccgtatatttgcgtcgcgagttcaggacacctatgggcggtcttgtcggatgaatttgcctttcattagggtcccatctacggtgtttgagactatttattatgcgatgcgcccagagaggttttctccagtaagaactcaggttactgatgttcaaactgtgtcattcgttggtatgattattgatcgaaaggtattgaataaccatcttaacgatatccatgatgaacttttcctttattatgatgattttttctttggttataagctagtattgtccgggcagaaaattcgttactccccagaaattaaatttattcatgatatctctattcatggaaagtgtatctgccccgaatggaaagtatattatctttgtagaaatttgttgctgctgagaaaacttttacccgttcccaggatattcagtgttctttctatagtgttacgcctctctaaatatctcgccatattaccatggcagcgtaagaaatttcgttatctatattttatctggcagggaatacttcatggacttaaaggtattagtgggaaatatcattagcaggacgaagagatgaaaaggttatgttattttgtaaattcagactggtactttgatttacattggacagaacgtgcgatagcggcaagggatgcgggttatgaaattcatatcataagtcattttattggtgaagagattataaaaaaattcaaaacgcttggttttatttgtcacaatgtgtctcttgttgctcagtcatttaatatgtttgttttttttagagcattccttaacgctcggaaaattattaaagagattaatcctgacttattgcattgtattacgctcaaaccttgcctgattggtggggttagcgccaggagaagtaatagtccagttgttatcagctttgtcggacttggtcgaatctttttatataataccgtgccaatgagaatattgcgtgcgttaaccgttttggtttacaaatatattgccggtaataagcgtggtgtttttatttttgaacatgataaagatcgacgaaaaatatcgcgtttagtaggtattgattatcataaaactatcgttatcgaaggtgctggaattaacccggatatttataaattctctatagagaaaaaacatgagataccgatagtcctttttgcaagccgaatgttatggagtaaaggtcttggcgatctcattgaagcaaaaaagatcctcagacaaaaaaatattcattttgttttaaatgttgcaggtatattggccgaggacgataaagatgctatccctttggagctcattcatcactggcataatgaaggactaattaactggctgggacgctcttcgaatgtatatgagcttattcagaaatcgaatatcgttgcattaccatctatttatccggaaggagtaccacggcttttattagaggcatcatctgtaggacgtgcatgtattgcttatgataccggcggatgtgatagcttaattattcataactataatgggttgatcgtgaaaagtaattcagctcaggagttagcggtagaattagagtatttgttaaaaaatccacagattcgcttagagatgggggcgaatggaagaaaacgtgtaaaggaattgttttccagcatattagtcattaataagacattgcaaatttataaagacactattggttgctaacaccataaagtgcttatgaagtaggtcagtgtttagataaatagtatgtaaatattatagaaaataaataagttatattttcatatcgttaaagaataagttcttcaggtaaaggtgacacggaaacaatgaatgatttgaaagaagctctggccaggcaccaactttggatttcgctaggttggaatgatgtcctgggacgataccggcgatcggtgttagggcctttttggataacgatttcgatgggggtcaccatatcagcgatgggacctctttacggttcgctgttcagttctggttccgaaaattttatcatgcatcttactttaggtatgatcttttgggcctttctatcagcaactattaatgagtcatgcggaatatttaatgagtccgcatcaattattaaacaatctgaccttccgctatatttatatatattacgtgttttctatcggcagtttatgattatgttgcataattttatcattatacctttcgtgattttttttaccaatacatcggtaaatcttgatattctcctttttatacctgcaattgtaataacatccatctcattaatttctacaggtatgattctcgccattttttgcacaagatatcgtgatatgggaccggttgttcaaagtgtggtaacgttgtgtttttttataactcccatcatttggacatcggaacaattaccaaagggaagaaaggagtttgttgattataatattttttattactttatggagatgctcaggaaaccattaatgggaactgtaccagatgtaactatatggttttacacaataataacctctattattatgttgatggtctcaaccttagtgttgactaaatatcgctcaagaatcgtatactggttataattaatgaaaatctcttgcaaaaacgttggcgtaatactccctatatttaactccagccaccgttcatttaaaaaaacttttctacaggctgcttcaggtggacgaattggctcatcgaataccgggattattgaagtagaggcattaaaaaaaattgattttacgcttaccgaaggtaaccgtcttgcgcttatcggacacaatggttcgggcaaaacaactcttctgagagtacttgcaggggcctataaaccaacttcagggaagtatgaatgtattggtcgagtcaccagcctcattgatcccatgatgggaatggatggtgagcttaccggcctggaaaatataaaactgaggggactatttctcggtctgtcaaaaaatgaaataaaaaatattacagaagatgtcatcgagttcagcgagttaggtgattttattaaaatccccgttagaacgtattctagtggtatggttctgaggcttggtttttctatttctactgcaattaatcctgaaattttactgatggatgaatggatgagcgtgggtgatagtgattttaaaagaaaagcagagatgagattaaatagctttatctctaaagcgggcattatggtaatggccactcacgatgatgaactggctaaatctgtatgtaataagttcatcaggcttgagcacggtgagatagttagcaaaggcggattttaatattcttattgcagtatttatatcactacgcggtgagaaatttactattttataatagcgttaccccagataatataaatttataggttcgttatgtattttttacttcaaaaagtaattttaccaaacattgatctatgcacggaagagcagctttatttcagaactcagggcgggaagtataactatacctcacgtaacttacttgttccgcgtcataaggttgcatattttgatactttttttaatgcattctcaattaagaaatggaaaaaatatacaaccttaacatcactttttttgcgggttaatataattggtcgcggaactataactgtaaggcataaagagaatggtgtcattagagtattaaagcaaattgattttaaatcgtcatgtaatattagtgatgagattgagattgatatatcaaaaataaattttggatatatctatgtggagtggcaatcagacgaagactctgttttaaatggatttgaattgctgactaaagatcatgttagtaaatcatctatggctttagttataacaacttataatagaaaagaagctgttactaaaacaatcaatagaattaataaaacactcttaacccagagcgaatttaaagatcgttttaaattgattgtcgttaataatggcgaggcgattaatcacccgtcaggaaacggcattatagttatcaataatgaaaacctcggtgggtcaggcgggtttatgagaggtttgatagaggcagggaaaatcaacgatgtcaaacatgtcatatttatggatgacgacggctcatgtgaaattgaatcgatttgtcgaactcatgcttttttactgatggctaaagacaaaaatacagttgttactggctgtatgctttttgaagataacccggcaatcatacatgaatctggtgccatatggcatagagattttttacattacccggataaacattatctggatgctcgggaaatagattctttagatacttttgataatgaaagaaaaataggctacggtggatggtggttttttgcctttaatattaacgctattgaatattactcatttcctttctttgttcgtggtgatgacctgctatttggatatatgcataaaaaacataatattgtcacacttaatggtgtggcttcgtggcaaatggattttgaaagaaaaatatcggttctaaatagctatttgaacttcaggactgttgctgtacctgcattaattagtaaaagaaagtttgctgcactactgttaagtgttttctttgtgcgggaagtctttcttgcgagtttttcatgccgctatgaacttgccagagcaatgattatgtcatataacgattgtctttctggacgggagttttgggaagataatgtagatcttctggagataagaaaaagaattaatgcaataactcataatgaaaaattcaatgtagaaggtattgatattgttaatggttgtgttgattacccatgttctggtaaagaaaaagccatctacaaattttttagatgcataacccttaatggacacttaattccagctttctttttaattaaaaaaccaatcgtggttgattatcgtcattatcaccctactaagttttcattccggagaattactatctatcatttaaatatagaaaatggcaaattattaaaacttacccactcaaaaatggagttttttaaagttattattaatggtttgtttacggcagtcaaaaatttttatcggtttaaatctgcaaaaaaagagatgaaaaatagtttgccctatcttacctcaaagctcttttggtataaaaaattcaataaaaaatctgaagataaatattaaacatgatgtaagtggtgttgatgagaattataccgattttttaattatatgactatgataatcttaggtatggttctgttgctacaccttatctggtgtcagtctaataaaatattataatccttacccaatgtcagcatttattcatagggtgttaatttttatatataccgtaaaacgcgaaatcagaatatggaaaagagtcttttagttattgtccgacataaacctgggcgtactcgtctattaatgcgggccttgcaatccattaatgaccagacgttcaaaaaaataaatatcatcattttctgcatggaggaagaattgaaatgtcacaatgtggatgatttttatctgaaagaactgtcaaatatatatagtgttatctacgacgaaagctgtatctttaatgctattaagatgtctgaatctaattatttatgctttatgggtgatgacgattcttgggcccctgaatatgtgtcaaggctactcagtgttttggcgaatatacagtcaacgtattcatctgtaaatgcaatagcatgccatacaaataaagttgctgagattgcggaaaataatagaataattataaattcaacgcaaccatggaaccactatttaaatgctggccctgttagttttgatgttatttattacaggaattctattccactttcctcgtgtttattcgataaaaattctgttatcgatatgattgaaagtcataaattatcctctcctgcatttttctggcctttttttattcattaccttgcagaaaatgatgtttggatcttacctgaagcactggcattttatcatttcagagaaaatgatgactttgaatttggcaattataccgtaattaacaatgagttatttgatatagaatgcaaaattgcagaaaataaaatgatgagaagtattgatgactcatcattgctcaatgtgttactttcaaatattgctaacaatagtctttttcataaaatttcttatattgaaaataagattaaataaaatatggatatgaactttaaaaaatacaagaccgtaagctttgatatctttgatacattggttagccggaggatttaccgtcccagagatttgttttcattaatgcaatcaactttagcaactgagaaattttttatatcagcgtacgagattggtattattgataatttcccagagataagagttcaggcggaagtaagtgccagagagaatagggtcaggcgttttggcggcgagccggaaatacttatatctgaaatatacgatgaaattttaaaaaagcatccgcagctttcaccagcgacagtaaaaaagataatcgatctggaaatacaaatggagaagattgttttatataaaaatgcgcgtggaagctgtttgtttgaaaaggctattagtgatggttgcaaagtcattttaattagtgacatgtaccttccatcagcaatattaaaggagttgttaacatcatgtggctatgatatcagtaacattccagtttattcatctggcgaagagcggtactctaaaaatagtggtaaattattttcaatagtcaagaaaaatgaaaatgtagatattgcatcgtggatgcatgttggcgacaatgttcatgctgatattctgaatgctaaaaaactcggcataaatactctccatgctgattggtcagagtataatcatgggatatctaatcattggaaagctaaagatattattggtgaatctatttgtaagactttattacttaaacaagtttctgctttccatcaaaatgatcctttaaacgagataggatttaaagtatttggtccattattattaggttatgtatcctggttagcgaatcagttaaagattcataaaattgataaagcgctttttttagcacgcgatgctcacttaatctataaaatttataatgaatacttttcagaagaacatgtaaaatgtgaatatttatatatatcccgcgcatcagcttatatggtggggatgactgattggccgatgcacaggatttggcatctttttggtggtaagaataagaaaagtattaaaaagatacttgctatcgcggggttagatgcgagtgagcatatttcagatatacatcatgttggttttcctgacgaggagtatattcctgtttcaggagaggaacataaggttcactggcttataaataaattatttccatatattttattaaaaaatactcagcacagggaagtttacgctgattactttaaaacggcctgtgaaggttataaaaatatagcacttatcgatgtaggatggatgggtaatattcaatcagtatttgctcgttctttaggtgcgcaatgggcagaaaaacaaatacatgggttttatttggcaacttttgctggcgccaatgataaccgatctatttataataagatgtttggttggctaaccaactatggccatcccaacgataagtgtgatcttttcttatcaggaggggtggaaataatggagttcgctatggctgacaatactgggtcaacaattggctataaaaaaacggataatggaataattcctgtacgtgaagatagcagtggttctgaaattgagtatttaaaaaaagcagcaagattgcaatcagggattatttctttttttgagtacgtcaaaccgctcatacaaaaaggaaattatgcagcacttagtagtgttgtattgtcagaacctttttttgaattgatagccagaccctcaagcgctcaactggacgccttatcttccctcacacattcagagtccgcgggatctaacgcagaaagaatcgtgctagccaagaaactgcctttaaaggataaactttttcccggagaaaattatatcaaagagttgaatgccagttattggaaagaaggctttaaaaggatcaacagaaaaaaattttgggcaaaatataactaagcgtcatttaattccggtaggcagacaatcattattgggcgctcgcccgacaagggctgagtcgattatgccctggcgcgatcatgttaaccctgacggggaagtggtctcgtgctgcgataatgttattatcactggataccaccgcctgtttgtccatccgctgtggatgttcattatggtgttcgatgtgcattccagatagtcagaggcggtgtagtccattaatcaactgttaacaaaggatattatcatgcctgaaggcccggaaattcgtcgtgcggcggataatctggaggcggcaatcaaaggcaaacccttaaccgatgtctggtttgcctttgcacagttaaaaccgtatgaatcgcagcttaccggtcaacttgttacccggatagagacgcggggaaaagcgttattgacccacttttcaaatggcctgacgctctacagccacaaccaactctatggcgtatggcgggtgatcgatactggtgaaataccgcagaccacgcgtatattgcgcgtcaggctacaaacggcggataaaactattctgctttatagcgcgtctgatatcgaaatgctgacagcagagcagctcacgacgcacccctttttacagcgagtcggtccggatgtgctggacgcgcgtctcactccggaagaggttaaagctcgattgctgtcgccgcgttttcgcaaccgacaattttccgggctgttgctggatcagtcctttctggcgggactggggaattatctgcgcgttgaaatcctctggcaggtaggattaaccggacagcataaagcgaaagatctcaacgaggcgcaactgaatgcgctttctcacgcgctgttggatattccgcgcctttcctacactactcgcggtcaggcggatgagaacaagcatcatggcgcactgtttcgctttaagcttttccaccgtgacggcgaagcgtgtgagcggtgcggcggcattattgaaaagacaacactgtcctcacgcccgttttactggtgcccgcattgccagaaatagccggaaccgacatcggcgagcggctattgcctgatggcgcgacgcttatcagccctacaaaggttgtttgggcgcataggttgatataaaacgggccactgctggcccagttaacagaatgctgaacagccgtagggtttgcattgccatgatgagcgccatatcggcactgcttcctgccgcgatcgcggcaaccgtatccagaccaccgggactggtggcaagataagccgtcataaaatcaatctgcatgtagtaagccattccccacgccatcgcggcgcaaatcgccatcagcgcgaaaattgacaataagatttgcggcaatggccgcagcgccataaaaaacacctgtctgtcaaaacccagcccaatacgccagcctatcgccatatacgccacggccagcagccattcgggtaattcaatctcaatgatgccttgcgaatggagaagcgcgcctgccaacatggggagcagcatcgtgccggaagggatacgcatcaggcgaccggcaatgcccgccacgatcgctaataacagcgtcgtcaatacattaccgctaagcggcggaaaccagatcacctgttggctgaccgctgccgcgctgtcgccgagtatcaggcgtgtcaccagcaccgccgcgccagccacaaacagtacccgtagatactgcataaacgccaccaggcggatatccgccccgtaatcttgcgccatcgctaccattgccgccgcgccgcccggcgaagacccccatgcgccggtgttgccgggcagtgagctgtaacgtaccagcagccagccgactaccgcgctggaaagcagcgtcaccagcaacactaaaagcacgaccggccagtagagggcgagggtggtcaatatcgaaccggttagattttgggcgatcatacagccgagaattgcctgcgcggcgagaaaaataccgcgcggaagttgtagcgtactacctcgcaaactcaacacgatacccgcaatcattggaccgagcagcattgccgccggaaggtgcagatagagaaaaataagggaaatgagcagcgataacaggaacaacaaaaaccactgcagaatcggcattccatgctccctgaatgatatttagcgaaaccttaattaatcatagagagtaacggggtaagaataaaataatgaggataagaaaaaagggaaaatgtaccggatggcgagggttgcgtcgccatccggttgtcaattaacgcttcagcgccgatttaaaatcgcgtttatcgtagccggtatacagctgacgaggacgggcgattttcatgccgtcagtgtgcatttcattccagtgtgcaatccagccaacggtacgcgccatggcgaagatcacggtgaacatggaggacggaatgcccatcgctttcagaatgatgccggagtagaagtctacgttcgggtacagtttcttctcgatgaagtacgggtcgttgagcgcaatgtgctcaagctccatcgccacttccagcagatcgtctttggtgcccagctctttcagcacttcgtggcaggtttcacgcatcacggtggcgcgcggatcgtagtttttgtaaacacggtgaccgaagcccatcaggcggaaagaatcattcttgtctttcgcacggcgaacaaattccggaatgtgtttaacagagctgatttcttccagcattttcagcgcggcttcgttggcgccgccgtgcgcgggtccccacagggaggcgatcccggcggcaatgcaggcgaatgggttggcgccgcttgaacctgcggtacgtaccgttgacgttgaggcgttctgctcatggtcagcgtgcaggatcagaatacggtccatcgcgcgctctagtaccggattcacttcataggtttcacacggcgtggagaacatcatgttcaggaagttaccggcgtaggaaaggtcgttgcgcggataaacaaacggctgaccgattgaatatttgtaacacatcgccgccatggtcggcattttggacagcaggcggaacgccgcgatttcacggtggcgcggattgttcacatccagcgagtcgtggtagaacgctgccagcgcgccagtgatcccgcacattaccgccatcggatgtgagtcgcgacggaaagcatggaacaggcgagtgatttgctcatggatcatcgtatggcgggtgactgtcgttctgaactcgtcatactcttcctgcgtcggtttttcgccgtacagcaggatgtaacagacttccagatagttggaatcggtagcaagctggtcaatcgggaaaccgcgatgcaacaaaatgccttcgtcgccgtcgatgaaggtgattttagattcgcaggatgcggtagaggtgaaaccagggtcaaaagtaaaaactccttttgaaccgagactacgaatatcaataacatcttgaccgagtgtaccttttagcacatccagttcaatagcagtgtcaccagtaagggtgatttttgcctttgtatcagccatttacggtctccttagcgccttattgcttaagactgccggaactcagacttgccttctccacgtcatcttcctcgtcgttagtgcagggaagattctgtgtatgcatcaatcaaccgttaccagtttgttatttggctcgccgctctgtgaaagaggggatgacctgggtacagagcaatgggcgcttgcaggtaacgacttgattaatttcgaattagcagcaaatcaggaacgtagcaatccgagtaatgtaacctgtctatcactaataactgtcctgaaagaatgggtcaatatcattgtactgttgcataacttattaacaggtgaaagagtgaccccataacttttacgcattatatgctttttctggtgtcgtttgtaacaattttgtttaatgtttgtcaaatcagatgattgaaaattaaaaaaatgttgttatcgtgacctgtgtcactgttcaggataaaacccgacaaactatatgtaggttaattgtaatgattttgtgaacgtcctatactgccgccaggtctccggaataccctgcaatcccgagccacccagcgttgtaacgtgtcgttttagctactggaagcagtgttttacatgacgcgcagttatagaaaggacgctgtctgacccgcacgcagaccggaggaaggaaatcccgtcgtctttctggctacaggtagattcacctctgtaaccgaagtcttaagggaataataagaacagcatgtgggcgttattcatgataagaaatgtgaaaaaacaaagacctgtcaatctggatctacaaacgattcggttccccatcacagcgatagcgtccattctccatcgcgtatccggtgtgattactttcatcgccgtcggcatactactgtggctactgggcaccagcctctcttctccggaaggattccagcaggccgccgacatcatggacggcttcatcgttaaatttatcatgtggggcatccttaccgcgctggcgtatcacgtcatcgtgggaattcgtcacatgttaatggattttggctatctggaagaaacattcgaagcgggtcaacgctctgccaaaatctcttttgttatcactgtcgtgctttcacttctcgcaggagtcctcgtatggtaagcaacgcctccgcattaggacgcaatggcgtacatgacttcatcctggtccgtgctaccgctatcgttctgacgttatacatcatctacatggtgggttttttcgccacgagcggcgaactgacctttgaagcctggaccggtttcttctcatcggccttcaccaaagtcttcaccctgctggcgcttttttccatcttgattcatgcctggatcggcatgtggcaggtgttaaccgactacgttaaaccactggcagtgcgtctgatactgcaactcgttatcgttgttgcgctggtggtttacgtcatctatggatttgttgtggtgtggggtgtgtaatgaaactgccagtcagagaatttgatgctgttgtgattggtgccggtggcgcaggtatgcgcgcggcgctgcaaatttcccagagcggccaaacctgtgcgctgctctcgaaagtcttcccgacccgttcccataccgtttccgcgcagggcggtatcaccgtggcgctcggcaatacccatgaagataactgggaatggcacatgtacgacaccgttaaggggtcggactacattggtgaccaggatgccatcgaatatatgtgtaagaccggaccggaagcgattctggaactggagcacatggggctaccgttctcccgtcttgatgatggacgtatctatcagcgcccgttcggcggccagtcgaaaaactttggcggcgagcaggcggcacgtaccgcggcggcggctgaccgtaccggtcacgccttgctacacacgctgtatcaacagaatttgaaaaaccacaccacgattttctccgaatggtatgcgctggatctggtgaaaaaccaggatggcgcggtggtggggtgtaccgcactgtgcatcgaaaccggtgaagtggtgtacttcaaagcccgcgcgacggtgctggcgaccggcggcgcaggccgtatctaccagtccaccaccaacgctcacatcaacaccggtgacggtgtcggtatggcgctgcgtgccggtgtcccggtgcaggacatggaaatgtggcagttccacccgaccggcatcgccggggcgggcgtgctggtgacagaaggctgccgcggcgaaggcggttacctgctgaacaaacacggcgagcgctttatggagcgttatgcgccgaacgccaaagacctggcgggtcgtgacgtggtggcgcgttccatcatgatcgaaatccgtgaaggccgcggctgtgatggtccgtgggggccgcacgctaaactgaaactggatcacctgggtaaagaggtgctggaatctcgcctgccgggtatcctggagctgtcccgtactttcgcccacgttgacccggtgaaagagccgattccggttatcccgacctgccactacatgatgggcggtattccgactaaagtgaccggtcaggcgctgaccgtgaacgagcagggcgaagacgtggtcattccggggctgtttgcggtaggcgaaatcgcctgtgtatcggttcacggcgccaaccgtctgggcggtaactcactgctggatctggtggtctttggccgcgcggcggggctgcatttacaggaatccatcgccgagcagggcgtgctgcgcgacgccagcgagtctgacgttgaaggttctctggagcgcctgaatcgctggaacaataaccgcaatggcgaagatccggtggctatccgcaaagcgttgcaggagtgtatgcagcataacttctccgtattccgtgaaggcgacgcgatggcgaaagggcttgagcagttgaaagtgatccgcgagcgtctgaaaaacgcccgtctggatgacacgtccagcgagtttaatacccagcgtgttgagtgtctggagctggataacctgatggaaaccgcctacgccactgccgtatcagccaacttccgaacggaaagccgcggcgcgcatagccgcttcgatttcccggagcgtgatgatgccaactggttgtgtcataccctgtatcagccgcaaacggaatccatgacgcgccgaagcgtcaatatggagccgaaactgcgtccggcgttcccgccgaagattcgtacttattaattgcggagacaggatgatgaaactcgaattttcgatttatcgttataacccggatgtcgataacgctccgcgtatgcaggattacaccctggaaggcgaagaagggcgcgacatgatgctgctggatgcgttaatccagcttaaagaaaaagatcccagcctttctttccgccgttcctgccgcgaaggtgtgtgcggttctgatggtttgaatatgaacggtaagaatggtctggcctgtattacccctatttcggcgctgactcagccgggtaagaagattgtgattcgcccgctgcccggtttgccggtgatccgcgatttggtggtagacatggggcaattctacgcacaatatgagaagattaagccttacttattgaataatgggcaaaatccaccggctcgtgagcatctgcagatgccggagcagcgtgaaaaactcgatgggctgtatgaatgtattctttgcgcctgttgctcaacatcctgcccgtcattctggtggaacccggataagtttatcggtccggcggggctgctcgcggcgtatcgattcctgatcgatagtcgtgataccgagactgacagtcgtctggaagggatgagcgatgcattcagcgtattccgctgtcacagcattatgaactgcgtcagtgtatgtcctaagggactgaacccgacgcgcgctatcggccatattaagtcgatgctgttgcagcgtagcgcataagtagttgtagtggttgccggatggcgacgtacagtcttatccggcctacaggcgcaaccccgtaggcctgataagcgcagcgccatcaggcaatagaagtgcaggaaacctctaaaaactgccatatgattagtaataatcgagatgttcagagcgagacaaggcgcggtctgaacgaatcttcgggagcatagttaactatgtgaccggagtgagcgaaggccgcaacgcagtcgtagcctgaacagcgaagattattagacagtttttaaaggttccttagcggacgcagatgacacgacagtccgcaacaagtgaaccccggcacgcatacagcgtatgcgtggttagtatccacggcgaaatactcgtcatagttcacgttgcatgtgcgttggctgcacttgctcaccccggtcacttactggatgtaagctcccagggattcgcaagcttgccgccttcctgaaacgtgacctatttagagtattaaataagcagaaaagatgcttaagggatcacgatgcagaacagcgctttgaaagcctggttggactcttcttacctctctggttcgaatcagagctggatagaacagctctatgaagacttcttaaccgatcctgactcggtagacgctaactggcgtttgacgttccagcagttacctggtaccggagtcaaaccggatcaactccattcaaaaacacgtgaatatttccggcggcaggcgttggctggctcacgtcactcttctacgatttccgaccctgacaccaatgtgaagcaggttaaagtcctgcagcttatcaacgcttatcgtttccgtggccatcaacatgcaaacctcgatccgctgggactgtggaagcaagaacgcgtggcggatctcgatccttctttccatgatttgaccgaggccgatttccaggaaaccttcaatgtcggctcctttgccagcggcaaagagacgatgaagctgggcgagctgctcgacgcgctcaaacagacctactgcggcccgattggcgctgagtatatgcacatcaccagcaccgaagagaaacgctggatccaacagcgcatcgaatccggtcgtgcggcctttagcgctgacgagaaaaaacgcttcctgaacgaactgaccgccgctgaagggctggaacgttatctgggcgccaaattcccgggtgcgaaacgtttctcgctcgagggggagatgcgctgatacccatgctgaaagagatggttcgccatgcgggtaacagcggcactcgcgaagtggtgctggggatggcgcaccgcggtcgcctgaacgtgctgatcaacgtactgggtaaaaaaccgcaggatctgttcgacgaatttgccggtaagcataaagaacatctgggtaccggcgacgtgaagtatcacatgggcttctcgtcagatatcgaaaccgaaggcggtctggttcacctggcgctggcgtttaacccatcgcatctggaaattgtgagcccggtggtgatgggctccgtgcgcgcccgtctggacagactggacgaaccgagcagcaacaaagtgttgccgatcactattcacggcgacgccgcggtgaccggccagggcgtggttcaggaaaccctgaacatgtcgaaagcgcgcggttacgaagtgggcggtacggtacgtatcgttatcaacaaccaggtgggtttcaccacctctaacccactggatgcgcgttcaacgccttactgcaccgatatcggtaaaatggtccaggcgccgattttccacgtcaatgcggacgatccggaagccgtcgcttttgtgacccgtctggcgctggacttccgtaatacctttaaacgcgatgtctttatcgatctggtgtgctaccgccgtcacggccacaacgaagccgacgagccaagcgcaacccagccgctgatgtaccagaaaatcaaaaagcatccgacgccgcgtaaaatctacgccgacaaactggaagctgataaggtcgcaacgctggaagatgccactgaaatggtcaacctctatcgcgatgcgctggatgcaggcgaatgcgtggtgaaagagtggcgtccgatgaatatgcactcgttcacctggtcgccgtatctaaaccacgaatgggatgaagcatacccgaacaaggtagaaatgaagcgtctgcaggagctggcaaaacgtatcagcaccgtgccggaagccattgaaatgcagtctcgcgtggcgaaaatttatggcgaccgtcaggcaatggcggcaggcgagaaattgtttgactggggcggcgcggaaaatctggcttacgccacgctggtcgatgaaggcattccggtgcgcctgtccggggaagactctggtcgcggcaccttcttccatcgtcatgcggtgatccacaaccagacgaacggctcaacgtatacgccgttgcagcatattcacagcggtcagggacagtttaaagtctgggactccgtgctgtctgaagaagcggtactggcttttgaatacggttatgccacggcggaaccacgtaccctgactatctgggaagcgcagtttggcgattttgccaacggcgcgcaggtagtgattgaccagttcatctcctccggcgagcagaaatggggccggatgtgcggtctggtgatgctgttgccgcatggctatgaagggcagggcccggagcactcttccgcgcgtctggaacgttatctgcaactttgcgccgagcagaatatgcaggtttgcgtgccgtccaccccggcgcaggtctaccatatgctgcgccgtcaggcgctgcgcgggatgcgtcgtccgctggtggtgatgtcgccgaaatcgctgctgcgtcacccgctggcggtttccacgcttgatgaactggcgaacggttccttccagccggccattggcgaaattgacgagctggaccctaaagccgtaaaacgcgtggtaatgtgttctggtaaggtttattacgacctgctggaacaacgtcgcaaaaacgaccagaaagatgtcgctatcgtgcgcatcgaacagctctatccgttcccgcataaagcggtgcaggaagcgctgcaaccatacgctcacgtccatgattttgtctggtgccaggaagagccgctcaaccagggcgcatggtactgcagtcagcatcatttccgtgaagtgactccgtttggggccgctctgcgttatgcaggtcgcccggcctccgcctctccggcggtagggtatatgtccgttcaccagaaacagcaacaagatctggttaatgacgcgctgaacgtcgattaaataaaggataaataatgagtagcgtagatattcttgttcccgacctgcctgagtccgtagcggacgcgaccgtcgccacctggcataaaaaaccgggcgatgcggttgttcgtgacgaagtgctggtagaaatcgaaactgacaaagtggtactggaagtaccggcatcagcggacggcattctggatgcggttctggaagaggaggggacgactgtcacctctcgccagatcctgggtcgcctgcgtgaaggaaacagcgcgggtaaagagaccagcgcgaaatctgaagagaaagcgtctacgccggcacagcgccagcaggcgtcgctggaagaacaaaacaacgatgcgctcagcccggcgatccgtcgcctgctggctgaacacaatctggaagccagcgccattaaaggcactggtgtgggtgggcgtctgacccgtgaagatgtggaaaaacatctggcgaaaggcgagtctaaagcacccgctgttgaacctgcagcacaacccgctctgggcgcgcgcggcgaaaaacgcgtgccaatgacccgcctgcgcaagcgcgtggccgagcgtctactggaagcgaaaaattccaccgccatgctgacgaccttcaatgaagtcaacatgaagccgattatggatttgcgtaagcagtatggcgaagtgtttgaaaaacgtcatggtatccgcctgggctttatgtccttctacgtgaaagcggtagtggaagcgctgaagcgttatccggaagtgaacgcctctatcgacggcgatgacgtggtgtatcacaactactttgatgtgagcatggcggtgtctacgccgcgcggcctggtcacgccggtcctgcgtgacgtggatacgctgggcatggctgacatcgagaaaaaaattaaagaactggctgtcaaaggccgcgacggcaagctgaccgtagaagacctgaccggtggtaactttaccattaccaacggcggcgtattcggttcgctgatgtctaccccgatcatcaacccgccgcagagcgcgattctgggaatgcatgctattaaagacaggccgatggcggtggatggcaaggtggaaatcctgccgatgatgtacctggcgctctcttacgatcatcgcctgatcgatggtcgcgaatccgtgggcttcctggtcaccatcaaagagttgctggaagatccgacccgtctgctgttggacgtgtagtcagcaagagcatcacctgctacctgtaggccggataaggcgttcacgccgccatccggcgatggtgtaatgcctgatggcgcgcagctttcaggcctacaggtctaaagataacgattacctgaaggatggacagaacacatgaacttacatgaatatcaggcaaaacaactttttgcccgctatggcttaccggcgccggtgggttatgcctgtactactccgcgtgaagccgaagaagccgcgtctaaaatcggcgctggcccgtgggtagtgaaatgtcaggttcacgctggcggccgcggcaaagcgggcggtgtgaaggtagtaaaaagcaaagaagagattcgcgccttcgcggaaaactggctgggcaaacgtctggtgacctatcaaacagacgctaatggccaaccggtaaaccagattctggttgaagcggcgaccgacatcggcaaagaactgtacctcggcgcggtagttgaccgtagttctcgtcgcgtggtctttatggcgtctaccgaaggtggcgtagagatcgaaaaagtcgcggaggaaaccccgcatctgatccataaagtcgcgctcgatccgctgaccggcccgatgccgtatcagggacgggaactggcgttcaaattgggtctggaaggtaaactggtgcagcagttcaccaaaatctttatgggtctggcaaccattttccttgagcgcgacctggcgctgatcgaaatcaacccgctggtgattactaagcagggcgatctgatttgcctcgacggcaagctgggcgctgacggcaacgcgctgttccgccagccggatctgcgtgaaatgcgtgaccagtctcaggaagacccgcgtgaagcgcaggcagcgcagtgggaactgaactacgtcgcgctggacggcaacatcggttgcatggtgaacggcgcgggtctggcgatgggcaccatggacatcgttaagctgcatggcggcgaaccggctaacttccttgacgtgggcggcggcgcaaccaaagagcgcgtcaccgaagcgtttaaaattatcctctcggatgacaacgtgaaagcggttctggttaacatcttcggcggtatcgtccgttgtgacctgattgccgacggtatcatcggcgcggtggaagaagtgggcgtgaacgttccggtggtggtgcgtctggaaggcaacaacgccgaactcggcgcgaagaaactggctgacagtggcctgaatattattgcagcgaaaagtctgacggatgcagctcagcaggttgttgccgcagtggaggggaaataatgtccgttttaattaataaagataccaaggttatctgccagggcttcaccggtagccaggggactttccactccgaacaggcgattgcttacggtacgcagatggtgggcggcgtaacgccgggcaaaggcggcaccacgcatctggggctgccggtgttcaacaccgtgcgcgaagcggtagaagctaccggtgcgaccgcatccgttatctacgtcccggcgccgttctgcaaagactccatcctggaagcgattgacgcaggcatcaaactgattatcaccatcaccgaaggtattccgacgctggatatgctgaccgtgaaagtgaagctggacgaagcaggcgtgcgcatgatcggcccgaactgcccaggtgtgatcaccccgggcgaatgcaaaatcggcatcatgccgggtcacattcataagccgggtaaagtgggtatcgtttcccgttccggcacgctgacctacgaagcggttaagcagaccaccgactacggtttcggccagtccacctgcgtgggtatcggcggcgacccgattccgggctctaactttatcgatatcctgaaactgttccaggaagatccgcagactgaagcgatcgtgatgatcggtgagatcggcggtagtgcagaagaagaagcggcggcttacattaaagaccacgtgaccaagccggttgttggctatatcgcgggtgttaccgcgccgaaaggcaagcgtatgggccacgcgggcgccatcattgccggtggtaaaggcactgcggatgaaaaattcgcagcgctggaagccgcgggcgtgaaaaccgttcgcagcctggccgatatcggcgaagcgctgaaagcaattataaaataaaactcgctgttcctgcgggaacagataaatgtccgttttcgacatggttggccacctttacggtggccttttttatggctttattgtttgtggcaaagtacgggtgaagcatccgggatataaaattattggctttgtaaatactgaactataggaaaataatgcctcattaaaaaaacatggtggagtctaaaaataattgataataaccgtctggcagcggcagtaaatttactcagtttgctggttaactcttttgcagcaaatacagatgctgtcttagtgaaatacctgccgacctcactggagacggattatgcgctttccgccatgaaaaaaacgcattgcagcattacactatgttgacgctaacctctatagtaaattgacgcttgactctgtggccgcgcatgtttgcctgagcgcgaactacatgtctcctcagatgtatcgcgcttacacagactgcttgtttaatggcagaataaaacagctattttaatcataagagtaccgacattatttccatgaagtattaaagatatcgtttaataaatcatatgaacttttgctggttaaaagaggttaactttaaaaattattaagaacttattgacactattcgttcgtgattaatcatgtttaaaggatatttatggctgcgaataaacagaattatcactatgagtgacgtagaaattgagggtgaatctgtgaaggtgataacagaatcttcgctataataattatagagaggtaaatacggtgttattgaaataaagaaaaattagcgaataaaatgtttgtttctggctatctggaaagcttattagcgataattaaggcgataacctggcaagatgagcctggccattagtcgtcgggaaagggaagttggggcagggtaatcccggtgggatgatggcgcgtgtgcaatgagatagtttctttgctgtgttaattataagtaaaataaaaatagactaaatgtataaaataataagtattgataacctgcagaaaaaatctgtgagctatttagcaataattgaacatcaatgtggaatgttttttactggatgcggggcagtaaaaaacgcacaaaatgtttagccttatcgaataagtctctttttacagggggtttgaaattactctttgcaaaaacaaaaagttaacaaaaaattcaccatgcattcaatgaataaacattattaacattaacttcaaaaattgattttaatcaatatttaaatgttggaaaagagcatcaaaactggttaaattgtccgtgatcaaattccctgaaaagcgatagattagccataaattgatcgctgtcgaaaaaagcaaatctgacccactaaaaacctgtttattgtaagggttttacggcgtaatatatttgcgggatcaatttgggttttttattaacatgtttgtaacttttcatcattactgtttccttcccgaggggatagtacgatggaaggccgcaaataaatttgtattggggcatgcgtgtgaccctttctaacggggttcactctcggagtcttcatgcgatgagcaaggagtcatgatgttagatatagtcgaactgtcgcgcttacagtttgccttgaccgcgatgtaccacttcctgtttgtgccgctaacgctcggtatggcgttcctgctggccattatggaaacggtatacgtcctttccggcaaacagatttataaagatatgaccaagttctggggcaagttgtttggtatcaactttgctctgggtgtggctaccggtttgaccatggagttccagttcgggacaaactggtcgtactactcccactatgttggggacatcttcggtgcgccgctggccatcgaaggtttgatggccttcttcctcgaatccacctttgtaggtctgttcttcttcggctgggatcgtctgagtaaagttcagcatatgtgcgtcacctggctggtggctctggggtccaacctctccgcgttgtggattctggtagcgaacggctggatgcaaaacccaatcgctgcggatttcaatttcgaaaccatgcgtatggaaatggtgagcttctctgaactggtgctgaacccggtagcacaggtgaaatttgttcacactgtggcgtccggctatgtcaccggcgcgatgttcatcctcggtatcagcgcttactacatgctgaaaggtcgtgacttcgcctttgctaaacgctcctttgctattgccgccagcttcggtatggctgccgtactgtccgttatcgtactcggcgacgaatccggttacgaaatgggcgacgtgcagaaaaccaagctcgctgcgattgaagctgaatgggaaacgcaacctgctccggcctcctttaccttgttcggtattcctgaccaggacaaacaggaaaaccatctggcgattcagatcccttatgcgctcggtattatcgctacgcgttccgtggacacgccggttattggcctgaaagatctcatggttcagcatgaagagcgtatccgtaacgggatgaaagcctatgaactgctggagcagctgcgcgccggttctaccgaccaggccgttcgcgaccagttcaacagcatgaagaaagatctcggttacggcctgctgctgaaacgctatacgcctaatgtgactgacgcgaccgaagcgcagatccagcaagcgacgaaagattccattcctcgcgttgcgccgctgtacttcgctttccgtatcatggtggcgtgcggcttcctgctgctggcgatcatcgcactttccttctggagcgtgattcgtaaccgcatcggtgagaaaaaatggctgttgcgcgcggcgctatacggtattccactgccgtggattgcggttgaagcaggttggttcgtcgccgagtatggtcgtcagccgtgggcgatcggcgaagtgttgccgacagccgtagcgaactcatcgctgaccgtgggcgatctgctgttctccatgttcctgatttgcggcctgtataccctgttcctggtggcagaattgttcctgatgttcaaatttgcacgccttggcccaagcagcctgaaaaccggtcgctatcactttgagcagtccaccgtgacttctcagccggcacgctaagacaggagtcgtcaaatgatcgattatgaagtactacgttttatctggtggctgctggttggcattttgctaattggtttcgctgtcaccgatgggttcgacatgggggtggggatgctcacccgtttcctcggtcgtaacgacaccgaacgtcgaattatgattaactctatcgctccacactgggacggtaaccaggtgtggttgatcaccgcgggcggtgcgttgtttgctgcctggccgatggtttacgccgcggcgttctccggtttctatgtggcgatgatcctggtgctggcgtctttgttcttccgtccggtcggttttgattaccgttccaagattgaagacccgcgctggcgcaacatgtgggactggggcgtgttcatcggtagctttgtgccgccgctggtgattggcgtggcctttggcaacctgttgcagggcgtaccgttccacgtggatgagtatctgcgtctgtactacaccggtaacttcttccagttgctgaacccgtttggtctgctggcgggtatcgtaagcgtagggatgatcatcacgcagggggcgacttacctgcaaatgcgcaccgttggcgaactgcacctgcgcgcgcgcgccacctcgcagattgcggcgctggtgacattagtgtgctttgcgctggcgggcgtttgggtaatgtatggtattgatggttatgtcgtgacatccgcgattgatcatcatgccgcctctaacccgctgactaaagaagtggcgcgtgaagctggcgcctggctggtgaactttaataatgctccgatcctgtggttggttccggctctgggcgtggttctgccgctgctgactatcctgacttcccgtatggagaaaggcgcgtgggcattcctgttctcttcgctgaccctggcctgcattattctgacggcgggtatcgctatgttcccatttgtgatgccgtccagcacgatgatgaatgccagcctgaccatgtgggatgcgacatccagccagatgacgctgaacctgatgacctgggttgcggcggtgttcgtaccgatcattctgatctacaccagctggtgttactggaaaatgttcggtcgtatcactaaagaacatattgaaagcaacacccactctctgtactaagtaaggagcttaaaatgtggtatttcgcatggattctgggaacgcttcttgcctgtgcattcgggatcattaccgccctggcgcttgagcacgttgaagcgggtaaaaccggtcaagaagaaagctaatgattcatattgtcgctatgcaatatacaaaatcatttaagttgcatcgcggcggcaaggctgcgaatccccaggagcttacatcagtaagtgactggggtgtgcagccgcagccaacaaagaggcagcttagaggatgaagtatatttatgcggtaatggacaagcgcccgttaagggcgctttccttcgtgatggcgatagtgctggcaggatgtatgttctgggacccgtcacggtttgccgccaggaccagcacgcttgaaatctggcacggattattgctgatgtgggcggtttgcgcaggcataatccacggtgtgggttttcgccctgaatccgtacactggcaagggattttttgtccgctccttgcggatatcgtccttatcgtcggcctgattttcttcttcttgtgaataagaaacctccttaaaaatataggggcttgcataagcccatatatttttactctcccttaacttccccccattcccaagcctcattcccacgcgtatagtagcaacgtttaaaagctctacttttgttgcattaccgggatgtaaagtgaatacaaggcgatatacaacggcattcttgaggcattacggcggcaagcggatgacgccaacaaagaggctgcagggatgaataagtatatgtttcgatggccaattcgagtttattacgaagacacggacgccggcggtgtggtttatcacgccagctatgtcgctttttatgaaagagcgcgcacggagatgctgcgtcaccatcacttcagccaacaggtgctgctggcggagcgggtcgcctttgtggtgcgcaagatgacgctggaatactatgcgcctgcgcggctcgacgatatgcttgaagttcaaacagaaattacgtcaatgcgtggcaccgctttggttttcacgcaacgcattgtcaacgcagagaacacgctgctaaatgaagcagaggttctgattgtttgcgttgatccactcaaaatgaagcctcgtgcgcttcctaagtctattgtcgcggagtttaagcagtgactgacatgaatatccttgatttgttcctgaaggcaagccttctggttaaacttatcatgttgattttgattggtttttcaatagcatcctgggccatcattatccagcgaacgcgtattctgaacgccgctgcgcgtgaggcggaagcgtttgaagataaattctggtccggaatcgaactatcgcgtctgtaccaggaaagccaggggagacgcgatagtctgtcgggctcggaacaaatcttttatagcgggttcaaagagtttgtccggctccatcgcgccaacagccatgcgccggaggcagtggtagagggggcgtcgcgtgcgatgcgcatctccatgaaccgagagctggaaacgctggaaacgcatatcccgtttcttggcacggtaggctctatcagtccttatatcggtctgtttggcaccgtatgggggattatgcatgcgtttatcgccctgggcgcggtgaaacaggcgactctgcaaatggttgcgccgggtattgccgaagcattgattgccacggcgattggtctgtttgccgccatccctgcggttatggcttacaaccgactgaatcagcgcgtgaacaagctggaactgaattacgacaactttatggaagagttcaccgcgattctgcaccgccaggcgtttaccgtaagcgaaagcaacaaggggtaagccatggccagaacgcgtggacgaggtcgtcgcgaacttaagtccgaaatcaatattgtaccgctgctcgacgtactgttggtgctgctgctgatctttatggcaaccgcgccgatcattacccagagcgtggaagtcgacttgcccgaggcgaatcagtcgcaggcggtcagtagtaacgacgatccaccggtcattattgaggtttccggagtagggcaatacagcgtagtggttgataaagatcgaatggatcaactgccgtctgaacaggtgatcgcagaagtaaagcgtcatctgcaggctaatccgaaaacagtctttttaatcggcggcgcgaaagaggtgccgtacgatgaaataattaaagcgctgaacttgttacacagcgcgggcgtaaaatcggttggcttaatgacgcagccaatctgaagtctgcgtcccgttggcttgaaagacggcgagtaacaggcgaacagttttttgggaaccgagagtgtcaaaggcaaccgaacaaaacgacaagctcaaacgggcgataattatttcagccgtgctgcatatcatcttatttgcagtgctgatctggagttcgtttgatgagcatatagaggcttctgccggcggcggcggtggttccgctatcgacgcggtgatggtcgatcctggcgccgttgtgcagcagtacaaccgtcagcaggatcaacaggccagcgccagacgcgcggaagaagagcgtaaaaagctgcaacagcagcaagcagaggagctgcagcagaagcaggctgctgaacaggagcggttgaaacaacttgagaaagaacgtttagcggctcaggagcagcaaaagcaggctgaagaagcggcaaaactggcgcaacagcagcagcaacaggccgaagaagcggcgaaagcggcggcggacgcgaagaaaaaagcggaggccgaggcggcgaaagcggcggcggacgcgaagaagaaagcggaagccgaagcggtaaaagcggcagcggacgcgaagaagaaagcggaagccgaagcggcgaaagcggcggcggacgcgaagaagaaagcagaggccgaagcggcgaaagcggcggcggaggcgaagaagaaagcggaagccgaagcggcgaaagcggcggcggaggcgaagaagaaagcggatgccgaggcggcgaaagcggcggcggaggcgaagaagaaagcggatgccgcggcggcgaaagcggcggcggaggcgaagaagaaagcggatgccgcggcggcgaaagcagcggcggacgctaagaagaaagcggctgccgaaaaagcggccgccgcagaaggcgtcgacgatctgcttggcgatctcagctcgggtaagaatgcgccgaaaaccggcggcggcgcgaaagggaatggtcagccatcgaaagatagcggtacatcgggcgctaacggtggggcgacaggcgctgatatcagcgcctacgcgaaacagattcaggtcgccattcagagccgtctgtacgatgcgagcctgtatcagggcaaacaatgtgtcttgcatattagcctggcgccggatggctcattaaaaagcattacgtctgagggcggcgatccggcgctttgtcaggcggcgttaatggcggcaaaaaccgcgaaaattcctaaaccgccaagccaggctgtttatgagaaaataaaggatgccaaactagactttaaactgtagatacttttctttatggaagttagagcagttgagttgttactggtcctggtggttttgtgtatttgagtttgttaacattctgctaaattatcgtgggtcgcaggcccaggtatgggagatatgatgaagcaggcattacgagtagcatttggttttctgatgctgtgggcggcggtgctgcacgcagaagtccgtatcgagatcacccagggggtggactcggcgcgaccgattggcgttgtgccttttaaatgggccggaccgggcgctgcgcctgaagatatcggtggcatcgtggcggcagatttacgcaatagcggtaaatttaatccgctagaccggtcccgactgccgcagcagccagccaccgctcaggaagttcagcctaccgcatggtctgcgctgggtattgatgccgtcgtcgttggacaggtaacgccgaatccggacggttcctacaatgttgcttatcagctggttgacactggcggcgcgccggggactgtactggcgcaaaattcttataaagtgaacaagcagtggctgcgttatgcaggtcataccgccagtgacgaagtctttgaaaaactgacgggcattaagggcgcgttccgtactcgtatcgcctatgtggtacagactaatggcggtcagttcccgtatgaactgcgtgtgtcggattacgatggttacaatcagtttgtggtgcaccgttctccgcagccgttgatgtctccggcgtggtctccggacggctcaaaactggcttacgtgacatttgaaagcggtcgctccgcgctggttatccagacgctggcaaacggcgcagtgcgtcaggttgcgtccttcccgcgtcacaacggcgcgccggccttctcgccggatgggacgaaactggcgttcgcgttatcgaaaaccggaagtctgaacctgtacgttatggatctcgcctccggtcagattcgtcagataacggacggccgtagcaacaatacggagccgacctggttcccggacagccagactctggcctttacctctgaccaggctggacgtccgcaagtgtataaaatgaacattaacggcggtgcggcgcagcgtattacctgggaaggttcgcaaaaccaggatgcggatgtcagcagcgacggtaaatttatggtaatggtaagctcaaataacgggcagcagcacattgccaaacaagatctggtgacgggtggcgtacaggttctgtcgtcaacgttcctggatgaaacgccaagtctggcacctaacggcacgatggtaatctacagctcttctcaggggatgggatctgtgctgaatttggtttctacagatgggcgtttcaaagcgcgtcttccggcaactgatggtcaggtgaaatcgcctgcctggtcgccgtatctgtgataataattaattgattactaaaggaattaaagaaatgcaactgaacaaagtgctgaagggcctgatgattgccctgcctgttatggcaatcgcggcatgttcttccaacaagaacgccagcaatgacggtagcgaaggcggtatgctgaacggcgccggcactggtatggacgctaacggcaacggcaacatgtcatctgaagagcaagcgcgtctgcagatgcagcagctgcagcagaacaacatcgtttacttcgatctcgacaagtacgatatccgttctgacttcgcggcaatgctggatgcgcacgctaacttcctgcgtagcaacccgtcttacaaagtcaccgtagaaggtcacgcggacgaacgcggtactccggagtacaacatctccctgggtgagcgtcgtgctaacgccgttaaaatgtacctgcagggtaaaggcgtttccgctgaccagatctccatcgtttcttacggtaaagaaaaacctgccgtactgggccacgacgaagcggcttacgctaagaaccgtcgcgctgtactggtttactaagagaattgcatgagcagtaacttcagacatcacctgttgagtctgtcgttactggttggcatagcggccccctgggccgcttttgctcaggcgccaatcagtagtgtcggctcaggctcggtcgaagaccgcgtcactcaacttgagcgtatctctaacgctcacagccagcttttaacccaacttcagcagcagctctccgataatcagtccgatatcgattctttgcgcggccaaatccaggaaaatcagtatcaactgaatcaggtgatggagcgccagaagcaaattatgctgcagctggggagcttaaataatggcggcgcagcgcagccagcagctggtgaccagagcggggcggcaaccactgcgacccccgccccggatgccggtacggcaacctcaggggcgccggtacaaagtggcgatgcgaataccgattacaatgcggcaattgcgctggtgcaggataagtctcgccaggatgatgcgattgtggcgtttcagaacttcatcaagaaataccctgattctacttatcagccgaacgccaattattggctgggccagttgaattacaacaagggtaaaaaagatgacgccgcctattatttcgcctcggtagtaaaaaactatcctaagtcgccgaaggctgcggacgcgatgtacaaagttggcgttatcatgcaggacaaaggtgatacggcaaaagcgaaagcagtttatcagcaggtgattaacaaatatccaggcactgatggcgcgaaacaggcgcagaagcgtcttaacgcgatgtaatgcgtaccatgcgaccagaaaacgccttttttctggtcgcgtcgtgcgattcctaagcagttgagccctctgcgtcgaaatttttgttgcgctcaaatctgaaatcagtaatatatgccgccgttgccacgggatattaaacaactcgaaagcaacgcaaaagtgggtcgttagctcagttggtagagcagttgacttttaatcaattggtcgcaggttcgaatcctgcacgacccaccaatcgttcggtggaaacgagaataaaacgtgaaggataacgttgcgtcagcaacggcctgtagggcgaggcgaagccgagtcatcctgcacaccactaacttcggttagtcagtaatatccagcgtagtatcgggtgattagctcagctgggagagcacctcccttacaaggagggggtcggcggttcgatcccgtcatcacccaccactcgggtcgttagctcagttggtagagcagttgacttttaatcaattggtcgcaggttcgaatcctgcacgacccaccaattttctaattggtgccgagtaaaaatatttcaggtagtcccaccgtatgggtcgttagctcagttggtagagcagttgacttttaatcaattggtcgcaggttcgaatcctgcacgacccaccaatatacaaggtggtaactggtagagaacgtgaaggttaacgttgctttagcaacggcccgaagggcgaggcgaagccgagtcatcctgcacgacccaccatcctgaatgattgaagcagtaacccttatccaaggggtcgttagctcagttggtagagcagttgacttttaatcaattggtcgcaggttcgaatcctgcacgacccaccaatgtaaaaaagcgccctaaaggcgcttttttgctatctgcgatatggaagattcgaacctgccgcaggttcgggtctcacgtagtgagacaacggagccgcttgcggcgacggcccgaagggcgagcaaagcgagtcatcctgcacgacccaccaatgtaaaaaagcgccctaaaggcgcttttttgctatctgcaatatgaagattcgaacctgccgcaggttcgggtctcatgcagtgagacaacggagccgtttacggcgacggcccgaagggcgagcgaagcgagtcatcctgcacgacccaccaatgtaaaagagggcgctggcggcgcctttttgctatctgcaatatggaagattcgaacctgtcgcaggttcgggtcttgcctgatgcgctgcgcttatcaggcctacagacggcaccgctcacgtaggccagataagacgttacgccgccatcagatacggggctacgtaattattgtgactttccttattgaatcagctatcttgtttagcatataaaacaaattaaccgattgtggcgtttattacgctttcattcggttgtttcgttaagtcagtaaaacgagaagccacgatgagcgtaatgtttgacccacaagccgcaatctacccgttcccgccgaaaccaacgccgttgaacgacgacgaaaagcaattttatcgtgagaaaatcaagcggttgctcaaagagcgcaatgccgtcatggtggcgcactactacaccgatccggaaattcaacagttagcagaagaaaccggcggctgtatttccgactcactggaaatggcccgtttcggcacgaagcacgccgcatccacgctgctggtagcgggcgtacggtttatgggggaaaccgccaaaatcctcagcccggaaaagaccattcttatgcctaccctggcggcggaatgttcgctggatttaggctgcccaatagacgaatttagcgctttttgtgatgcgcaccctgacagaaccgtagtggtctatgctaacacctcggctgctgttaaagcgcgtgcggactgggttgtgacctccagtatcgccgtagaactgattgagcatctggatagtttgggggaaaaaattatctgggcgccggacagacacctggggaattacgtgcaaaaacagaccggggccgatgtactgtgctggcaaggagcgtgtatcgtgcatgacgagtttaaaactcaggcgttgacccgtttaaaaaaaatctatcccgatgccgctcttctggttcaccctgaatcgccgcagtccattgtcgagatggccgatgcggtgggctccaccagtcagcttattaaggcggcaaaaacgctgccgcacagacagcttatcgtggcgaccgatcgcggcatcttctacaaaatgcagcaggcggtgcctgaaaaagaactgcttgaagcgcccacggctggcgagggggcgacctgccgtagctgcgcgcactgtccgtggatggcgatgaatggcctgaaagccattgctgaagggctggagcagggaggcgcggcgcatgaaatacaggttgatgcggcgctacgcgagggcgcattactgccgctcaaccggatgctggattttgcggctacacttcgggcgtaaagacggaaatctttgggggagagaatggatttttttagtacgcacaacatactgattcatattccgattggcgctggcgggtacgatctctcgtggatcgaagcggtaggaaccatcgccggcctgctctgtatttggcttgccagtctggagaagatcagcaactacttttttggactggttaacgttaccctgtttgcgattattttctttcagatccagctttatgccagcctgttgctgcaactctttttctttgccgccaatatttatggctggtatgcgtggtcgcggcaaacaaaggataatcaagccgagcttaaaatccgctggctgccgttgccaaaagcaatggcatggctggcgatatgtgtgatagctatcggtttgatgacgcgatatatcgatcccgtattcgccgtcctgacgcgcgtggccgtcgccattatgcagatgctggggttacaggtgacaatgcccgtactgcaaccggacgctttcccgttctgggactcttgcatgatggtgctgtctatcgtggcgatgattctgatgacacgcaaatatgtcgaaaactggctcctgtgggtgataatcaacgtgatcagtgtggtgatttttgctttgcagggcgtctatgcgatgtcgctggaatatctgatcctgacatttatcgccgtgaacggtagccgcctgtggataaacagcgcgcgggagcgaggatcgcgcgcgctttcccgttaatggtgatgaacatgcccggacgatgtctgattcagatgacagtccgggccgtgacacacttgatactccatctgaatcgtagcgtgcgcaatatggtattcgtgcatcaggaaatcctggatacgttccagcagcgcatcatggtcgtgtggcggaatgacctgagcgtgcaacgtcatgaccggtttttcgccgaccatccagacatgcacatggtgtacgttgcggacttcggggatttcccgacttaaatggcgctgtaaggcattaatatccagtgaaaccggcgcgccttccagcaattcgttgacgctatcttttaacaaacgccaggcgctgcgtagcaccagtaccgaaaccagaatagagagaatcgggtccgctggcgtccagcctgtccagataatgatcaacgcggcgactattgcgccgacggaacccagcaaatcgcccatcacatgtagcgcggcagcgcgcacgttcaggtttttttcatcgcttccccgatggagaatccagaacgcaaacaggttcgccagcagacccgcaaccgcaatcaccatcatcagattgcccgccaccggacgtggcgtgtaaaagcgctctatcgcttcccagacaatgagaagggtaatgaccaccaacgcaatggcattcacaaaggccgccagtgtggtgagtcttagccagccaaaagtgtggcgaacagtcgggggacgacgggaaaattgaaccgccagcagcgcaaagagaagggccgccgcgtcggtgagcatatgtcccgcatccgccaacaacgccagagagccggagagtatcccgcccaccacctcaaggagcataaatccggcagtgacgataaaggcgaaaagcaggcgacgagcattattatctttcggcaggtgtgaatcggcatgagagtgtgagtgcgccataacgtcattcctttgttattctcatcaatactgtagacatcatactgatttttcgctgacaaaataaaaaggagagcgaaagctctcccgttatcagacttttttttgcattactgtgtggtaccgtcggttttggtattcacgtcattattgacgccattaccggtttccacttttttattaatatccgggcagcgaccgtctttacacatggtatttttatgctcttcatccttggtcattccgtcatgattcatggttgaaccgtctggatgctgcatcgtgctgttagtattgccgttggtattgatgtcgttgttattcacatcattcggcgctacattctggcgggcgtccggggcaacctgaccggcatttgccgccgagttcgcctggccattactggattgcgcgttagattcagcagctaacgctgcgccgctggcaaggccgagggtagcggtcagtaaaagcgtagtcagttttgtcattttcataagatgctcctgttatggtggatatgtcggataacctcttccaacagtgcacgtgtcagtcaaatcctcaaataagggataaaaagcgttcgccgccgcgggttaacgcagcagagaatcttgcaataattcataaacagagtggttacagttaaaaagtgtagattagatcccatttttcgctacatttgtgcgtttttttcctgaattccaggattattccgttcaaagtgtaaaagcccgtttacactatttaattgaagagatagattggagggattgcattcattgggataagtacggcaacactggaataaacatgaattatcagaacgacgatttacgcattaaagaaatcaacgagttattacctccggtcgcgctgctggaaaagtttcccgccacggaaaatgcagcaaataccgttgctcacgcgcgcaaagccatccataaaattctcaaaggcaatgacgatcgtctgctggtggtgatcggtccttgttcaattcatgatccggcagcggcgaaagagtatgccgcccgtttgctggcgctacgcgatgagcttcaaggcgagcttgaaattgtcatgcgcgtctattttgagaaaccgcgtaccaccgtcggctggaaagggctgattaacgatccgcacatggataacagcttccagattaacgacggtctgcgtattgcgcgcaaactgctgctggatattaacgacagcggcctgcctgccgccggcgaattcctcgatatgatcacgccgcaatatctggccgatctgatgagctggggcgccattggcgcgcggactactgaatcccaggttcatcgcgaattggcgtctggcctctcttgtccggtcggttttaaaaatggtactgatggcacgattaaagtcgccattgacgccatcaacgccgccggcgcgccgcattgcttcctctccgtcactaaatggggtcattcggcgattgtgaataccagcggcaacggcgactgccatatcattctgcgcggcggtaaagcgccaaactatagcgcgcagcatgttgctgaggtgaaagaaggcctcaccaaagcgggactgacgccgcaggtcatgatcgatttcagccatgccaactcctgtaagcaatttcaaaagcagatggaggtttgcgccgatgtctgccagcagatagcgggcggtgaaaaagcgattattggcgtgatggtagagagtcatctggtagaaggaaaccagagtctggaaagcggtcagccgctgacctacggtaaaagcattactgacgcctgtattggctgggaagataccgatgcgctgcttcgtcagttgtcggcagcggtaaaagcccgtcgcggctaagtttagtttctatcctgtagtgaagtgcaggatagaaaacatattggtccggtaacagcctaccggaccggtattaccaatattaatgtattattatttggcgtacttaggtacttcctgcttctggagagtatttccttccgaatcaattcctacaatgagtctatagcggtcaaaatataacttcttaatggattctgttcctaattcttcgtaggcaacaatttctactgatttaacatgttttgtattaattgcagacgctcctccaatcccgagtagcgaaaccccaccgtattttttacaaagctcagcgacataatcagcacgatcgcctttgccaagaaacgcagttgccccttgttgaaacatcatttctacaaatgggtccatacgcgcggccgttgtaggaccgttggagccaataggtaaaccaggtctggcagggcaggggccagcatagtaaattgtttggttttgaaaatcgactggtgatttttctccgttactaagcgctacttcgatttttttatgcgcggcgtcacggcaggtgtaagcaaatccagtgagaaataatatatcgccgaccttaagagttttcgctttctctttagtcaatggtaatgttaattccatcatagcttctccaggtattaaatgatttcactagcgtggcggcttgcattacattggaaattgattgcgactggcagtgcagtgatatggcaaggatagtaatcgacatgcacgcctaacgccgtaatacgcccgcccatacctaaagggccgatccctgtattattcacggcctctaataattcagcttcgagctgggcataaagtggtttagcattgaactcaccaagagggcgtaataatgctttcttcgccatccacgaacagtgatccattgtaccgccaacgccgataccaataatataaggagggcatggattgcctcctacacgacggacagtttccagaacaaaatcttttataccatcaataccatcgccgggaagcaatgttttaaaagttcccatattttcgctaccgccgccctttggcataacggtaattgtcactcggtcaccatcaacaatttcagtatgtaaaattgcaggagtattatcattagtattaatacgttctaatggatctgcaaccatggattttcttaagtatccattttcatagccctggcgaacaccctggttcacctgatctttaagcggcttaccttcccagcatacatgttgtccaatttccattataacgatacaagtgccggtatcatggcagcatgcaagttgttctttttttgcatactctccattatcaattaatatcttaatggtttccttgccgatctttgactcttctttatcatatgctttacgaaaagaacacatgagattatcatccagttcataacaagctttttttacaagtttttcgataatcggaatgataatttctgtatttaatatacgactcatactccctccagtgctatgttgcattgttttatccattgatcacattttcatgatattcgtattcattgtaggaaggaaatatgttatttttattaaatgataaattttatttatagtagtggaaaatagatggaaattagacaattagaatattttgtaagcgcttctttgttaggtaacttaaccagagttgctgagcggcattttgtttctcaacctaatatcaccattgctattaagaagttagagactgaattaggggtgacattatttgatagaaagaaaaataaacttgtccttactgaggagggcatgtttttcttacaaaaaattgaacctatccttattgcgttaaaaaatagcgtagcggaaatgaaagattatcgtaatgaaaatggtggcatagtaactttggggatcccaccgatgataagtttgtttcttttttcaccgctcttcaagcatttccgagagatttatccagagatggaactctctcttgttgaagaggggacttttggtttacatgataaactttctgctggagagctggatcttgctattgttattattaatgactgtccaaaagaattagttacggtaccattaatgactcagcagcacgtggtatgtatgtcagataaacatcctctggcaaaaaaggatagtatcgattgggaagatctacaatatgagccattgatactaatgaaaaaagattcctggcatagaaaaacgattattgaagaatgtacaaagcgaggaattcatacacatatttttctatcatcaaacagggttcaaaccaacatagatctggttgctaaaaatgaaggaatttctttcattttggacgctgtcgatcttaaagccgaaaaagtaataaccaaggccatgactgagctgacttatgttacgattggtttggcctggaagaaagataaatatttatcatatgcaaccagagcgttaattaaattcattgaggattatattaaagaacattttacaattaaataattatatttgttcttcaacaaaaatttcccatagctcttcggcatctggaggcattctcttggctggtctataaagtcttatttctatgggtacccataaattactttctttttccgctgcagtaacaatagttttagcctctatatcttgcctggcaaggctttgaggtatccaggcaacaccatcgccagatctgaccattgccaatagtgttgctgccagatcggccacaaaggcaacatttatattatgggtaattctgttaatagacgctgtatttgctattattcttcccagacctgattgtgatgaaaaagaaaggtaagggaattgaatcttattatttatattccacaacggttttaacgtttctgagtctggtttactgaatggaattaatgtatcaaacccaagacgaatgctcataaagttatttttatttaaatttagatgcatatgtgggtgatggtgacacagcaaaaattgtgaatctccctgccgcatcattttttcgcacgcattcaatgagtcagataaaagacgaaatgaaccaaattttgcaattttatcactctgttttaacaaatgcggtacaaaagagaaagacaaagcatgcgttgctgaaaaaacaagactgggttgtttattacctgcggcctcaagggtatcacttttcaatgtgtacaaggagtggatcagttcgggaagctggtctgtaaatacttctccggccttggtaagggtgactccccgtttacttctttcaaaaaggggcgtacccacccattcttcgagagattgtatccgacgactaaatgcgggttgagtcacatatcttgaggcagacgcttttgagaaattcaacgtttcttttagagccagacagtcttcgagccatgttagttcgaggtgatgccgatattgcataagctgcaaccttattagcattggatgagtttcatttatataagtagcattatacacagacagattttaagaggaaattatttgattaaacagaaacaaaagcagtaagaatatgttatgcctttgtcgggtaagtgttgttatttatgtgagtgtattctttctcaatagaaattaattagatgtaattttagtataacatgtgatttatgcttgttgcagttgtattcatgactgtaatgagttgtttttgtaccctaataatataaggacgtatacatgtcaccagcgattattactttgttggttttagtggttgcaataattatctttgttagcgatcgtcttcctatgggattagttgcatttatggtcccaatggcactttattttaccggtgttatcgatgctaaggatatttttgcttcaatcgtaaatgcgaatgttattcttatcgtcgccatgtgtgtactcggtgcggcattttttaaaacaggtttggcatggcaatcaagtaaaattttactaaaatatgctaaaacagaaagaagccttagtgtattgatttttcttattggtggagttatgtctgcctttgtttctaatagcggaacagttgctgtgctaattcctattgttttaggtattgccgccagtagtcagattaagcctattaaacttcttatgcctctggtttttggggcaacaatcggtgctgatatttctattatcggttcgccaggaaatctgattgctaaaaatactattgaaacttttagtaagggaagtctgtcggtgccatttttcgaatacgctaaaattggtattcctttgctgattgcatgctctatatttctctatttcttcggttcaaaactcatcgcagatcgtgatggaaatacacaatctgattctcaaatggattatagccaaattccggcctggcatagaaatttaactttagccgtttttattctgtctatcgctggaatggtggcaactgattatattaagtttctgcctccaatgcatattattgcgtgttgtgcggctattgttcttgtatttgctggcgttttgacacaaaaggaaacttttaattcttttgaaacactaactgttttcatgcttgcgtttatgatgcctttaggagccgcgcttaattctactggtgctggagaaatgattgctaatgccgttatttcagtaaccggagattctggcgttatgattattatggcgtcattgtggatacttacatgggctttgactcaagttatgagtaacactgcagcatgtacgttgttatgcccggtaggatggactatcgcacagtctattggcgcagaccctcgtgcagttgttattgctgtttttattgcgagtagtgttgctgtttgtaccccaatggctattccagcaaactcaatgattattggcccggggaatgttaaatttaaagattttttaaaacccggattggcgattagtttggtttgttttatcgttagtatgattttactaccgatattttatcccttctattaatgcctgatattacttttctattttagattattaaatttgagactttattatgaatagttcggtgctattaggtgaaggcttcaccctgatgttcctcggcatggggttcgtgctggcgtttctgttcctgctgattttcgccatccgcggcatgtccgccgccgtcaaccgcttcttccctgaaccggtcccggtaccgaaggcggcacccgccgccgcgcccgcggacgacttcgcccgcttaaagccggtgattgccgccgctatccaccaccatcgccgccttaacccttaattcacggaggaatccatgaccgttgccattaccgatgtcgtcctgcgcgacgcccaccagtccctgttcgccacccgcctgcgccttgacgatatgctgccgattgccgctcagctcgacgacgtgggctacggctccctcgaatgctggggcggcgccacctttgacgcctgcatccgctttctcggcgaggacccgtggctgcgcctgcgcgagctcaaaaaagccatgccgaagactcccctgcagatgctgctgcgcggccagaacctgctcggctatcgccactacgccgatgacgtggtggaacgcttcgtcgaacgcgccgtcaaaaacggcatggacgtgttccgcgtcttcgatgccatgaacgacccgcgcaatatgaaagccgccctgcaggcggtgcgcagccacggcgcacacgcccagggcacgctctcctacaccaccagcccggcgcacaccctgcagacctggctggatttaacggagcaactgctggaaaccggcgttgactcgattgccatcaaggatatgtccggcattcttacaccgatggcggcgtatgagctggtcagcgaaatcaaaaaacgttttgaggtacgcctgcacctgcactgtcatgccaccaccggcatggcggagatgacgctgctgaaagccattgaagcgggcgtcgacggcgtggacacggcgatttcctccatgagcgccacctacggccacccggccaccgaagcgctggtggcgacgttggcaggtactgagcacgacaccgggctggatatcctgaagctggaaaatatcgccgcctacttccgcgaggtgcgcaaaaaataccacgcctttgaaggccagctgaagggctacgacagccgcattctggtggcgcaggtaccgggcgggatgctgaccaacctggaaagccagctgaagcagcagaacgcggcggacaaactcgaccaggtgctggcggaaatcccccgcgtgcgcgaggacctcggctttatcccgctggtgacccccacctcgcagattgtcggcacccaggcggtgctcaacgtgctgacgggcgaacgctacaagaccattgccaaagaaacggccggcattctgaaaggcgaatacggccacacgccggtgccggtgaacgccgcgttacaggcccgcgtgctggaagggggcgctccggtgacctgccgcccggcggatttactcaaaccggagctggctgaactggaagcggacgtcaggcgtcaggcgcaggagaagggcattactctggcgggaaacgccattgacgacgtgctcaccgtggcgctgttcccgcagattggcctcaaattccttgagaaccgccacaacccggcggcgtttgagccactgccgcaggcggaagccgcgcagccggtggcaaaagcagagaagcctgcagcttccggtatctacaccgtggaagtggaaggcaaagcctttgtggtgaaggtcagcgacggcggcgatatcagccagctcactgcggctgttccggcggcctcttccgcaccggttcaggctgccgccccggcaggcgccggcaccccggtcaccgcgccgctggcggggaatatctggaaggtgattgccaccgagggccagacggtggccgaaggcgacgtgctgctgattctggaagccatgaagatggaaaccgaaatccgcgccgcgcaggccgggacggtacgcggtatcgcggtgaagtccggggacgcggtctccgtcggcgacaccctgatgacgctggcgtaacggagaactgaaatggaaagtctgaacgccctgcttcagggcatggggctgatgcaccttggcgcaggccaggccatcatgctgctggtgagcctgctgctgctgtggctggcgattgcgaagaagttcgagccgttactgctgctgccaattggcttcggcgggctgctctccaacatcccggaagcgggtatggcgctgaccgcgctggaaagcctgctggcgcaccacgacgccgggcaactggcggtgattgccgcgaagctgaactgcgcgccggacgtgcatgccattaaagaggcgttagcgctggcgctaccgtcggtgcagggccagatggagaacctggcggtggacatgggctacacgcctggcgtactggcgctgttctacaaagtggcgattggttccggtgtcgcgccgctggtcatcttcatgggcgtcggcgcgatgaccgacttcggcccgctgctggccaacccgcgcaccctgctgctgggggcggcggcgcagttcggtatcttcgccacggtgctcggggcgctgacgctgaactacttcggccttatcagcttcaccctgccgcaggcggcggccatcggcattatcggcggcgcggacggcccgacggcgatttacctgtcgggcaagctggcgccggagctgctgggggccatcgcggtggcggcgtactcgtatatggcgctggtgccgttaatccagccgccgattatgaaggcgctgaccacggagacggagcggaaaatccgcatggtgcagctgcgcacggtgagtaagcgggaaaaaatcctctttccggtggtgctgttactactggtggcgctgctgctgccggacgccgcgccgctgctggggatgttctgctttggcaatctgatgcgcgaaagcggcgtggtggagcgcctgagcgacacggtacagaacgggctgattaatatcgtcaccatcttcctcgggctgtcggtgggcgcgaagctggtggcggacaagttcctgcaaccgcagacgctgggcattctgctgctgggggtgattgcgtttggtatcgggacggcggccggggtactgatggcgaagctgctgaacctgtgcagtaagaacaaaatcaacccgcttatcggttcggcgggggtgtcggcggtgccgatggcggcccgcgtatcgaacaaggtgggcctggagtcggacccgcagaactttctgctgatgcacgcgatgggcccgaacgtggccggggtgattggctcggcgatagccgccggggtgatgctgaagtacgtgctggcgatgtaaatctgttcctttcccggaggcggcgcgttgcgcctgtccgggctaccggattgcatggatctgtagcccggacagatgcgcagcatcgtctccgggaatgtcccataaggagactttgatgaatgaaaccatagcatttcgtccggaaggccgggcatcgataaaagatgtggttgtcaattatacgctggcatcactggacgagcttgaacaactgcacccggcgctgaatctgctggcgcacccgtcaattgtccgtggcagccatgatttctttgtccgttgttatgacgcgggcgtacagcatgcgcaggccggggcggctgaaacggtagcggttttgcctgattcgctgccacaagaacggcaaaggagcgggctgctgtgtgccgcagcaggtcgtctggatgccctgcgccagccgctgacgcacaatcgtttatgtgacctggccagtcagttctgtgctggcatggcagatgttgacagcgaaacccgcagcggtttttataccgtgcgcagcatatcgctgccggtttaccggcggctgttgcgggatcaacattctcacggtgtctgcctgcagcaggctctgctgcacctgctggcctggaagagcgattctccctgggcgcggcagcaggcgcagcggctgctctggcagggcggcgtgctgggcgataaaggtgagtttgcgcttatgacgctggatgatgaactgcgggagcgccagattgggtggcccgggctgtggtcgctgctggccgtcaccgggtttctggcgaaattccctgccggaccgatatttgctgactgaaaaatgaggactgctgacaattatctgttgtgttggcatttctgcgagaggcagctagcgctttgcctgacttacgaaacgagaatatcaacagattacgtactttttgtaggtccgtggttggaacattgccacctggttacacgttgtcagcagcctcaagcgtggatggctccacgctgtctttgtctatggaaaacccccagtcaggccctgtctcttgatcaggagatctgatcaagagacagggctatgccggaggatatttattggaaaccgatgagataggccaccgtgtcattaatcgaaatataaataaatatataacgaaataattcggcgctataattctcctctgattaataacgtagcccgaaccatgacctgtcaggacaaatcacttttagcccccgctctcgcttccacgcccgtcattccgcgctatcgccagatcatacgcaaacgggctgtgctcatgttagctattgcgttggcgatgatggcttcactgatggtggatgtaacctgtgggtcttctggtttaccgctcagtgcgctatggcaggcgctttttcaaccggaaaaagtgaatgcgggcatacacgttattgtctgggatattcgtttaccctatgccctgatggccctactggtgggcatggcgttagggttagcgggcgccgaaatgcaaaccattttaaataatccgctggcgacgccgtttaccctcggcgtatcgtccgcggcggcttttggcgctgcgctggcgattgtgttggggatcggtattcccggtattcctgccgcctggtttatcccggccaatgcgttcatctttgcgctgttatccgcgttactcctggacggtattacccgttggacaggcgtcgccgcatccggagtggtgttgtttggtattgcgctggtattcacctttaacgcgttggtcgccattatgcagtttgtggctgatgaagatacgctgcaggggctggtattctggacgatggggagcctggtccgcgcgtcgtgggaaaaattgggcgtactggccgtggtgtttattgctgtgcttttttgcgcgttacgaagcgcctggcaactcacggcattacgtctgggcgaagagagggcgatgagctttgggattcatgtccgccgtttacgcctgctgtcattgttgcgtatcagcttgttatcagcgctggcggtagctttcgtcgggccgattggttttattggtctcgttgcgccgcacattgcgcgaatacttttgggggaagatcaccgtttctaccttccgggcagcgtgctgataggcgggctggtgttatcgctggcctctattgcggcgaaaaatagtattccgggcgtcatggtgccggtggggattgtcacctcgctggtcggggttccgttctttttaagcattgtattgcgacatcgggggagtctctgatgcgcgggttaatgctccgctcatttagcgccggctattccactcagccggttattgcagatctcaacgttcccttactgccgcgcgggaaaattaccattttgctggggccgaacggctgtggtaaatcgacgttactacgttcgctggccgggctgaataacgccgacggcgaggcgctgcttgatggcgaagatctcatgtcgttatcgtttgccgagcgggcgcagaaagttgtgtttttgccgcagtcattaccgcagggcgtacatctgcatgtactggagtcgattatcgtggtactgcgggcatcaggcggcagagacaatgcgcagggcagagcgcagatactggctatccttgagcaattgggcataacgcatctggcgttgcagtatctcgaccagctttccggcggtcagcggcagttagtgggtctggcgcaatcgctgattcgtcgccctgaacttctgttgctggatgagccgctcagcgcgctggatttaaactatcagtttcacgtaatggatctcgtgcgtcgggatacccaggcgcaaaatagggtaacgatagtcgtggcgcatgacattaatattgcactgcgtcatggtgaccatgtcctgatgctaaaagacggcaggctggtcgccagcggcgcgccggagacggtgattactgcggagcgtctggctgaagtgtaccgggtacgaggacgcgtggagcgctgttcgcaggggaaattgcaggtggtgctggacggcgtgatcgctgtttaagacatattgcctgatggcgctgcgcttatccggcctacccattgctcgtaggccggataaggcagttataccgccatccggcaaaggtgattacttcgctttaccctgattcgccacggcagccgctttcgcggcgatttcgtcagcgttgcccagatagtaatgtttgagcggcttgaagttttcgtcgaactcatacaccagcggcacgccggtcgggatgtttaactcaaggatctcatcttcactcatgttatccaggtatttcaccagcgcacgcaatgagttaccgtgagcggcgatgatcacgcgctcaccgctcttcatacgcggcaggatggtgtcgttccagtaaggaataacgcggtcgatggtcagcgccagactttcggtcaacggcagctctttctcgctcagtttggcataacgtggatcgtgacccggataacgctcatcatctttggtcagttccggcggcgtcacggcaaaaccgcggcgccactgtttaacctgctcgtcaccatatttttctgccgtttccgctttattcagcccctgcaacgcgccatagtgacgttcattgagtttccaggatttttccaccggcagccacgcctgatccagttcatccagtacgttccacagcgtatggatagcgcgtttcagtacggaagtgtaggcaaaatcaaagctgaaaccttcttcttttagcagtttacccgctgcttttgcttcgcttacgcctttttcagacaggtcaacatcataccagccggtgaaacggttctctttgttccattgactttcaccgtgacgtaccagaaccagcttagttacagccatactctcactcctataaatcatatgtaatgataataattctcattatattgccgcgaggtgttggcggcaatgcttacgcataaccatagcgaaaatagtggcgcagtgtaaggttcttgtgaattcagagttgcgattttgtctttaagtggtggaggtttgagcagggcaatggcgcgtaggcccgataagcttgcgtcatcgggcatgtagcggcatatcgttagaacggaataaactgatactcggtcaggctggcgtactcctcgccagggcgaaggatacagtcaggctgcggccattcaggatgattcggactgtccggcagcagttcgctttccagcgccagcccttgccagtcggcataaggttccggcccgcgggaaggtgtacccgccagataattgccggaataaaactgtagcgccggggcggtggtgtaaaccatcatttgtagctttccatcctgtgaccacagacgggccgccggctttttgccatcaccctgcgtctgtagcaggaaagcatgatcgtagcctttaaccttgcgctgatcgtcatcggcgagaaattcactggcaatgacttttggcatccggaagtcaaacgaggtattggctaccgattttagcccctggcgtggaataccggattcatctaccggcagatactcatccgccagaatttgcagcttatgctggcgcacgtcggtccgatcgccgtccagattaaaatagacgtggttggtcaaattcaccggacagggtttatcgaccgttgcccggtaggtgatggagattctattgtcatcggtcagacgatattgcgccgtggcgcaaagatggccgggaaaaccctggtcgccgtcatcagaggtgagcgcgaataatacctggcgatcgttctggttcacaatttgccagcggcgcttgtcaaagccttccggtccgccgtgtagctggttctcgccctgacttgggcttaactgtacggtttcgccggcaaacgtatagcggctattggcgatacggttcgcgtaacggccaatagaggcgccgaggaatgacgtctgttcagggtagtgttccgggctggcgcagcccagcaatgcttcccgaacgctgccgtcagacagcggaatacgggcggaaagaagagtggctccccagtccatcagcgttaccaccatccctgcgctgttgcgcagggttagcaggcggtacggttgaccatcgggggccagtgcgggcgtttcatttagcactgtcctgctccttgtgacggtttgcatacataaaaggtttctttgattccggttttcgcttcgtactgttgcgcaacggcctgccgaacagcgggaaccagatcttccgggatcagtgcgacaacacacccgccaaagccgccgccggtcatgcgcacgccgcctcgatcgccgatggtcgctttgacgatgtctaccagcgtgtctatctgcgggacggtaatttcgaaatcatcgcgcattgaggcatgggactccgccatcagttggcccatacgttgcaaatcacctttctccagcgcgcttgccgcttcaacggtgcgcgcattttcgctcaatacatggcgaacgcgttttgcgactaccgggtccagttcgctggcaacggcattgaacgcctcaaggctgacatcgcgcagggccggctgctggaagaaacgggcgccggtttcgcactgttcacggcgggtattatactcgctgcccaccagcgtgcgcttaaagttactgttgatgatcaccacggcgacacctttcggcatggaaaccgctttggcgccgagcgtacggcaatcaatcagcagcgcatgatcttttttgccgagcgcagagatgagctgatccataatgccgcagttacagccgacaaactggttctcggcctcttgtccgttgagcgcaatttgcgcgccgtccagcggcaggtgataaagctgctggaagacggtgcccaccgccacttccagcgaggcggaggagcttaacccggcgccctgcggcacattgccgctgatgaccatatccacgccgccaaacgcgttgttacgctgctgcaggtgtttcactacgccgcgcacatagttagaccactgctggctatcgtgggtcacgatcggcgcatccagtgaaaattcgtccacctgattgtcgtaatcggcggcaatcacccgtacggtacgatcgtcgcgcggcgcacagctaattacggtctggtaatcgatagcgcagggcagaacaaaaccatcattgtaatcagtgtgctcgccgatcagattgacgcggcctggcgcctgaatcgtgtgggtagcagggtagccgaaaatttcagcaaacagcgcgcgcgttttctctttcagattcatttttatactccggattcgcgaaaatggatgtcgctgaccgcgcgcaggcgttcagccgcttgttctgcggttaaatcacgctgggtttccgccagcatttcatagccgaccataaatttacggacggtcgcagagcgcagcagcggcgggtaaaagtgtgcgtgcaactgccagtgtgcgttttcttcaccgttaaacggcgcgccgtgccagcccattgagtaggggaaggaacactgaaacaggttgtcataacgactggtcagctttttcaacgccagcgccagagagtcgcgctgctcgtcgcttaaatcggtaatgcgcaggacatgcgttttgggtaacagtagcgtttcgaacggccacgccgcccagtaaggcaccaccgccagccagtgttcggtttcgaccacggtgcggctgccgtccgccagttctcgctggacataatccaccagcattggcgagcgctgctcggcgaagtaggctttttgtaaacgatcttcgcgttcggcctcattcggcaggaagctgttggcccagacctgtccatgcggatgcgggttcgaacagcccatcgccgcgcctttattttcaaagacctgcacccacggataggttttgcctaactcggcggtctgcgtctgccaggttctgacgatttccgtcagcgcgggcaggctcaactccggcagcgttttactgtgatcgggagaaaagcagatcacgcggctggtgccgcgcgcgctctgacagcgcatcagcggatcgtggctgtccggcgcatccggcgtgtcggccatcagcgccgcgaaatcgttagtaaagacgtaagtccctttgtaatcgggatttttatcgccggtgacacgcgtattgcccgcacacaagaagcagtccggatcgtgggccggcagcatttgctgagacggcgtttcctgcgccccctgccaggggcgttttgcgcgatgcggcgaaaccagaacccactggccggtaagcgggttataacggcgatgcggatgatcgatgggattaaatggggtcataacaacgtccttaatctgggtatccctgcggatggcgtgactgccagtgccaggtgtcctgcgccatttcgtcaagcgtgcgggtgacgcgccagttcagctcgcgatcggctttgctggcatccgcccaatacgccgggagatcgccgtcgcggcgcggcgcgaagtggtaattaatgggtttaccgcaggctttactaaaggcgttgaccacatccaggacgctactgccgacacccgcgccgaggttataaatatgtacgccggatttgtccgccagtttttccattgccacgacgtgcccgtcggctaagtccataacgtgaatgtaatcgcgtacgccggtgccatcctcggtcgggtaatcattgccgaaaacggcgagcgattcgcgacgacccacggcgacctgggcgatatagggcatcaggttattcggaataccttgcggatcttctcccatgtcgcccgacgggtgcgcgccgaccgggttgaaataacgcagcagcgcaatactccactccggctgggctttttgcagatcggtgaggatctgttctaccatcaatttacttttgccgtaggggctttgcggcgtgccggtaggaaaactttcgacgtaagggatcttgggctgatcgccataaacggtggcagaggagctaaaaataaggtttttaacgttggccgcacgcatggcgctgaccaaccgtagcgtaccgttgacgttgttgtcatagtactccagcggcctggcgaccgattcgccgacggctttcaggccggcaaagtgaatcacggtatcaatcgcgtgatcgtgcagaatttcggttataagcgcttcgttgcgaatatcgccttcgacaaaggtcgggtgcttaccgcccagacgttcaatcacgggcagcacgctgcgcttgctgttgcagaggttatcgaggatgacgacgtcatgaccattttgcagcaactgtacgcaggtatgacttccaatgtaaccgctaccacctgtaaccaatactctcataattcgctccgttaagcctatggtatggaataaccatagcataacaaagatgcgaaaagtgtgacatgtaataaattagtggaatcgtttacacactggtgattttacgcatttgtatcgattaaatgattacaaatcatctggcttgagaatgcttctgctttttatccgaaaaaaaggcgcgttacgcgcctgggaatgaaacggacggggcaagagctgtcagtcttttttacgcgagagtagcttcctggcgagcgccccgacagcgacgacgccgatggcggtcactttccagaatttaagcaacgcgataccgagcatagcaagcagtcctactttcttggccgcgataccgccaatcagcgcggcgagcccatactccgctattttgtccgttgattcgttgaagtcagcgtagcgttgtccagcgttgaacttgacggaactgagaattcttttcgccagagggatttcgtggtcaacagaacctctgtcggtcaccagatttaaagaaaaatagccttcacgtcccagcagataggtgttgtagttcacgccttgttcattcagtggttcgttggtgccgatatcctggatggcggcggaccagatcagacgatgattggttgcatcgtaggtaggcttctcgatccagccaataatttctatcggctcaatgccttttgcaatacgatctttattcgcttcttttgtgcctttgcgcaggttatccattaattcatcggcatcccagttttttgcatcatcatcttttacataaccagaatcatcatattcgatagaaataaatccattcatttcctttttaaatacgaggccgtaaaaatattcatcgtcaacatagttaccaatttcacgcataaataccgccgcttcttttgcgggtatccaggtaaatccttccggcagattaagcgtggctttatcacctaaactaatctttgtcggacccgcaacggcggcgcgactcatgccttcaacagcgacctcaacagcggttttacgcgcttcctgcgcagcggtcggcttttgctcagcataactgctggggcaaaataaaatagctgccagtaaaaatagtattatttgtggaaaacgaaaagccataatgaatcccttatattcacatacgacatcattgtcgaaaatttcaggattattatgacaatgaggcggtcagcgattcaagagatagtaagcttatcgaccgttattattattcttaataaaaggagagtggttccagaatggcgcgcggcgccattctgataatacatttaattattgcatcgtccggaaacgtacttataacgttcgccctctggtacaaattccagccggtgggtaatacaggcaggcgcatcctctgcatgatgggaaacgaacagcagttgggtctctccctggcgaattaatacatctacaaaacggcgtaccagttggcggttcagcgggtccaacccttgcagcggctcatccagaatcaacactgtcggatgcttaaccagcgcgcgcacgattagcgccagccgctgctgtccccaggagagactgtggaagggggcatccgccgtacgcttatcgattcccagaatatccagccactgttgcgccagttttcgttgcctgtctgaaacggcctggtaaatgccgatagaatcgaaatagccggagagaatgacattgcgtaccgtggtactgacgcggtaatccagatgtaaactgctgctgacgtagccgatatgttttttgatatcccagattgtttcgccgcttcctcgccgccgcccgaacagcgtaagatcgttgctgtagccttgcggatgatcgccagtaataaggctaagcaacgtagacttacccgctccgttaggaccgacgatctgccagtgttcgcccggattgactcgccagcttaagtggtggaggatagggcgatcgttatacgagactactccatcgttaagtacgatccgtggttcgccatcgggtaacgcatggcgggcggaaggttcgtccggttcgggtaattgtacgtcggtcagacgctcgctgtgcgcgagttgagcaaccaacgcccgttgcagcaactccgccgtcgttccggtctccgccagcgtacagtcggcaagcacgccggcaaactgcacgaagtccgggatctcatcaaaacggttgagtaccagcgccagggtcatacccgcctggttcaacgccgtcaggcgttgcgccagttgttgacgggcggtcacgtcaagcccgtcgaacggttcatcaaggatcaataactctggctcagacatcagcgcctgacacagcagcgcttttcgcgtctcgccggtagaaaggtatttaaaacgcctgtcgagtaaagcggaaatgccgaactgctgcgccagtatcgcacagcgggcaggatggtgaacatcatcctgaataatttccgcggtagtgcgcccggtatcgtcttcgccaggactgagcatatcggtgttattacgttgccactcatcgctgaccagcttttgcaattgttcaaaggacagacgagtaatgcgggtaaaccgacactggcgctcgcctgttaataacggcagttcgcccgccagcgcgcgggcgagcgccgacttcccgctcccgttagccccaacgaatgcccagctatcgcccgcattgagcgtcagcgaatccagatgaagtgtttttgtatcgctcagacgaaacgtgccttgcgaaatttgcaacgatgacattttgcatcccattttttgcagcgatgaatgacagggatacgtctttcggcaacggatgtcaatgtgcttagcacaacgttgcaataatcactctgtccgcattaaaccaggcaatcacgtcatcgccttcctttaacgtggcggcatctgaagtcggtatcgtggcgcacagcgtctggccgtccggcagcgccatcaacacttcacactgttccgcgccgcgctcgatatggctgatcgttcccgacaactgattgtcagcggcgcgcgcaacggctgcatcccgggtaatgccaacccacggcgcttttagcaggatcagcacttcttttccctcctccaggccgagacgctcgccgctttgcgccgtcagcgcgactttgagccgcgttttgccgtcggccagcagcacgtcgacatgctgttgcaccagatcgcgatcgcgggcggtaatggtgccgaaccactgatttcgggcgctggtttgcagtgaaaagcgggagatagcggccagcagactgtcaagcggcagggcgtcatcgtcgcttaacacatcgaacgctttttgctgaatttggcccagcaaatcgtaaagctggatcagacgctggccatagcgggttaataccgcgccgccgccgcctttgccgcccgttgcgcgttcaaccagcatatgttcgctaagctggttcatgtcgtttatcgcatcccaggcgctcttatagctgattcccgcgtctttcgcgccctgactaatcgagccggaaagcgcaatgtgtttcagcagagagatacgtcggggatcggcaaaaagcttttgctgaagtttcagggtaagaaggatttcggcctgcataaccagctcctggtaaaaagactattgtgactgaaaagcgcgtcagcgcaaagccgaccgcacaaaaggggagtgcttttctgtgtgatgcggttaaaatacaaaaaggactatatctggagttgcccatgttagagttattaaaaagtctggtattcgccgtcatcatggtaccggtagtgatggccatcatcctcggtctgatttacggtctgggtgaggtgttcaacattttttccggtatcggtcagaaagaccagtccagacagaaccgctgatttccccaaacgcccgctcagtcgggcgtttttgttactcaagatcctgcttttcctgccgatattttctgtgtttaatcgttaatgggtatgaataaccgctgggaaacccctgagattatcgttatattatcgtttacataacgaaacgcacaaggagttacagatggcgcattcctggttacgcctggtcgcaggggcaacattatctttcgtcatcgccggtcatgcgctggcggatgaaggcaagatcaccgtatttgccgccgcgtcgctaacgaacgcgatgcaagacattgcggcagaatataaaaaagagaaaaatgtggatgtggtctcctcattcgcctcctcttcaacgctggtgcgccagatagaagcgggcgcgccggcggatctcttcatctctgctgatcagaaatggatggattacgcagccgataaaaaagcggtggataccacgacgcgcgaaacattgcttggcaatagcctggtggtggtagcgccgaaagccagcgagcagaaaccgtttaccatcgacaacaaaacggactggattcgtctgctgaacggcggacgtctggcggtgggcgatccgcaacacgtaccggcgggaatttatgccaaagaagcgctgcaaaagttgggcgcatggcaaacgcttgaaccgaaactggcgccgggcgaggatgtgcgcggcgcgttggcgctggtcgaacgtaacgaagcgcctttgggcattgtatacggttctgatgcggtcgccagcaagggggtcaacgtggtggcgacgttcccggaagattcacataaaaaagtggaataccccatcgctatcgtggaggggcataaaaatgcgaccgtcagcgcgttctatgattacctgaaaggaccgcaggcctcggcaatctttaaacgttatggatttacgacgaagtaatgatactgaccgatccagaatggcaggctgtccttcttagcctgaaagtgtcttccctggccgtgctgtttagcctgccgtttgggatcttttttgcctggttactggtgcgatgccggtttccgggcaaagccttacttgatagcgtcctgcatctgccgctggtgctgccgccggtggtggtcggctatctgctgctggtgtcgatggggcgacgcggatttattggccagtggctgtatgactggttcggtctcacgtttgcctttagctggcgcggcgccgtgctggcggcggcggtgatgtccttcccgctgatggtgcgggccattcggctggcgctggagggggtggatatcaagctcgaacaggccgccagaacgctgggcgccgggcgctggcgcgtttttctgactatcaccttaccgcttaccctgccaggcattattgtcggtacggtgctggcgtttgcccgttcgcttggcgaatttggcgcgaccattacctttgtttccaatattccgggcgaaacccgcaccataccttccgccatgtataccttgatccagacgccgggcggggagagcgcggcggcgaggctgtgcgtgatttcgattgtattagcgctgatttcgctgttgatttctgaatggctggcgcggattagccgtgaacggacggggcgctaaccatgctggagcttaatttttcccagacgctgggaacgcactgtttaaccctcaacgaaacgctgccagccagtgggatcacggctatctttggcgtctccggcgcgggaaaaacctcgctgattaatgccatcagcggtttgactcgcccgcaaaaaggacgcatcgcgctgaatggccgggtgttgcatgacgcggaaaacggtatctgtttaacgccggaaaagcgccgcatcggttatgttttccaggatgcgcgcctgttcccccattacaaagtacgcggcaatttgcgctacggcatggcgaaaagcatgaccggtcagtttgataagctggtgtcgctgctgggaattgaagcgttgcttgatcgcctgccggggagcttgtccggcggagaaaaacagcgcgtagcgataggccgggcattgctcaccgccccggagttgctgctgttggacgaaccgttggcctcgctggatatcccgcgtaaacgcgaattactgccgtacctgcaacggctggcgcgggaaatcaatattcccatgctgtatgtcagccattctctcgatgaaattctccacctggcggataaagtcatggtgctggaggatggacaggttaaagcgtttggcccgctggaagaagtctggggaagcagcgttatgcacccgtggctgccgaaagagcaacagagcagtattctgaaagtcagcgtgctggagcatcacccgcattatgccatgaccgccctggcgcttggcgaccagcacctgtgggtaaataaactcaatcagccgctgcaatccacactgcgtattcgtatacaggcgtcggatgtctcgctggtactacagccgccgcagcagaccagtatccgcaacgtattgcgggcaaaagtggcgaattgttatgacgataacgggcaggtggaagtccagcttgagataggcggcagaacgctgtgggcgcgaataagcccgtgggccagggatgagctgaatatcaagcctggcctgtggctttacgcgcaggtgaaaagcgtttctatcaccgcctgactatagcaggtgggtgtaaataaatttggcgatgctatcggtagtgttatcgccgatcacaacgtcagcgcgcgctttcaccgcctcatcggcgttgcccatcgcaacgccggtgcctgccgcctccagcatactgatgtcgttgtagttatcgccgaaagcgatcacatttttcattgaccctccctgcgcttctatccactgggtaaggcgcttgcctttactgttgcctttgcgcgcgatatccacctgatcgtgccatgaccattcgcactccaggccaagcgcctgttcaacatgctgaccgaaccgctgtagtctgggaatatcttcatcggtaagcgcaaacttccacacggcattcacgtcgcgcgccgcctgcgctaacgaagagacctgtgtaaaggtcggacgttgttccggcggcaaggtctgcgcccaccgggaggtacgcacgacgtggccggttgggtgttcgtaaagcatagcgtcatcaacatacatcaggccgtgaatctgatgctcatccagtaaatcaatcaactgcaacgccttatccacgggcataggatcggcatccaggacagttttagcttgataatcatacaaataggtgccgttgcagcaaatagcaggtgtttccagcgccagcgcctgataaaaaggatgaatagcaacgtgatggcgaccagtgacaatgataagttgaaagcccgcctctttggcgcgtgatagcgcttcaagcgaggaggggagtaaggttttatgcggggttaataatgttccgtctaaatcgagggcaatcacgcgtgcagtcataattttttccagattaagagtaataattccgtctgtcggcatggtacaccgggacggtaagcagacaaaattctgcgtctgaattcagcattcgccgtcaaaagcgactacgttaagctgtgtcctgttattgcagctacatgccatatgcaaaggagtattcatgaaacaaacagtctataccgccagccctgagagtcagcaaattcacgtctggagcctgaaccacgaagggacgctgacgctggtgcaggtcgtggatgtgcccggtcaggttcagccgatggtggtcagtccggataaacgctacctctatgtcggcgtgcgcccggagtttcgtgtcctggcgtatcgtattgcgccggatgatggcgcgctgacgtttgccgccgaatccgccctgccgggtagcccgacccatatttctaccgatcatcatggtcgttttgtctttgtcggatcgtataacgccggtaatgtcagcgtgacgcgcttacaggatggcctgccggttgagctggtggatgtggtggaggggctggacggctgccactcggcaaatattacgccggataaccgtaccctgtgggtgcctgcgctaaaacaggatcgcatttgtctgtttacgctaagcgatgacggccatctggtggcccaggagccggcggaagtaaatacagttgaaggggcaggcccgcgtcatatggtcttccacccgaatcgacaatatgcgtattgcgtcaatgaactgaacagttcggtggatgtctggcagcttaaaaatccgcatggcgagatagagtgcgtgcaaacgctggatatgatgcccgccgatttttccgatacccgctgggcggcggatattcatattacgccggatggacggcatctgtatgcctgtgaccgcaccgccagtctgattaccgtctttagtgtctccgaagatggcagcgtactgagcgttgaaggcttccagccgacggaagcccaaccgcgcggctttaatatcgacaatagcggaaaatacctgattgctgcgggtcaaaaatcacatcatatcgcggtctatgaaattacgggcactcaggggttgctgacggaaaaaggccgttatgccgtcggccaggggccaatgtgggttgtggtgaacgcgtactaaagcgctgtgtgccggatggaggcgggctggagctcatcaaggcgggatgcctgattaatttcaataaacattgcttgcagtaaaaccacgggccgccacatctgctgcggcggcccgtttataagcctgaaccggaacggtgattactgcttaggttccgccactactttactgcctataccgcggttgttgtattcccacatgcggttgtagttagtgtcgttcagattacgctgcacctcgtctttgtcatccacggttcccgtatttccagcaaacggacgtttcgagatgaccgcgtcggcccacggtttggcaacgttgaagccctcgttaatcacgctgtcgcggatcacgacctgaccgttggtgttggcgtcgacatccagcgagcggccaagctgcgcaacgccatcgccggaggcgttaaagcggctgttgatcgccaaaaagccatagtaaatattggacagcgtcgccggggcgaagacgtaggcttcctgctgtgtgcgggagttgacgacctggaagttggtgttatcgaacaccacggcgccgcgtccggaaaccatatccacatcgccttcaatatagctgttcgtcaccagcgtacgtggctggcgatcggtttgcagacggttctgcacgccgctgttggtcacaaagaaggtgttctggcggccaaggatattgaccttgttaatctggactttgtcgccatcggtacgcagcgccaccgccggatggtttccggcatcgacgctgtcgcccagcgtgttctcgatggtcagattttgtagctgcagaccgttattctgcgaccagaacgcggcagaacacattacaccgatcgtcgcggcgtgtttgctttggcagttatcgaacatataccaggcgggtttaccaggcatatatttcccgccgggattcaccgcgcggcgccagtcagcgacactcatttcaccatcaatcgccatcccaattttcacatcgatcggtttttcaccggtcccgtacagggtcagacttcccggcgcggcgggaacatacacggtcccctgatagtcgcccggcataatagcaatgtactggcgtttgttcgtgcgtttaaccattgccgcatcgaccgcggcctgaatcgaggtgtgcgtaacgcctggcgtacctgccggccccaccacaaagtcaggctgtgcgggcagggtaatcggcgacggcgaccacggggcggtattcggcgtcagggaggcaaaatagcgcgccgcaacgaagtttttcgcttcatttgccgacagaattgggcgcgaggcggtgccaggcgcggtttgatcggaagggatctgatcgggtggcgtagagctacaggcgctcagcgtcacgccaaaagccagtgccagcgccagacgggaaaccgataatgtattcacaggttgctccgggcttgaaaaagttaaatgacatccattgaagcctgcttttttatactaagttgaacgaaacgggaaggcgaaaaggtaaaaagttccttttcaggccggaaacacctgtagcatcagatagttttatcacaattaagcaacaactttcgcgctttgagttgacaatccggagcagaaagaaaataaatgtctatacaacccatgacaggcaagagagcgacaggaatgcggcaacttttaccgggcgatactgtctggcgaaacatcaggctggcgacaatggacccgcagcagcaagccctgtacgggctggtggataatcaggcgctgattgtgcgcgaagggcatatttgcgatatcgtgccagagacgcagcttcctgtcagcggggacaatatccatgatatgcagggacgactggtaaccccgggacttatcgattgccacacgcatctggtgtttgccggtaaccgcgccgcagagtgggaacagcggcttaacggcgcgtcataccagcatattagcgctcagggcggcggcattaacgcgacggtatcagcaacccgcgcctgtgcggaggagacgctctacctgctggcgcgcgaacgcatgatgcgccttgccagcgaaggcgttacgctgctggagattaaatccggctatggtctggagctggcgacagaagaaaagctgttgcgcgtcgctgcaaaacttgccgccgaaaacgctatcgacattagccccacgctattggccgctcatgctacgccagcggagtatcgtgacgacccggacggctacatcactctggtctgcgagacgatgattccgcagctctggcaaaaagggttatttgatgcggtagacctcttttgcgagagcgtcggctttaatgtggcgcagagtgagcgcgtattgcagacggcgaaggcgttaggtattcccgttaaaggccatgttgagcagctttcgctgttgggcggcgcgcagttggtgagccgttatcagggcttatcggcggatcatatcgaatatcttgatgaagtgggcgtcgcggcgatgcgtgacggcggtactgtcggcgtattattgcccggcgcgttttattttctgcgcgagacgcagcgcccgccggtagaactgctgcgccgctatcaggtgcctgtcgccgtcgccagcgatttcaatcccggcaccagcccgttttgcagtttgcatctggcgatgaatatggcctgcgtacagtttggtctgacgccggaagaggcatgggcgggcgttacgcgccatgccgctcgcgcgctgggaagacaggcgacgcatgggcagatcagggccggctaccgggcggattttgtggtgtgggatgctgaacagccggtagagatagtgtatgagccggggcgtaaccctttatatcagcgggtatacagaggaaaaatctcatgacgcaatggtatccggcttctccggcgctctggcaggggcgcgatgacagtatagaagcgccggatgcgcggcgtctgtttcagaccgtcacgcgcagcgagaccttttcccccgaaaactggcagcaaaagatcgcgttaatgggatttgcctgcgacgagggggtaaaacgcaatgcagggcgtcccggcgcggcaggcgccccggacgcgttgcgtaaagcgctggcgaatatggccagccaccagggacatgaacggctggtggatttaggcaattgggttgcgccgacgcccgatctggaaggcgcgcagcaggccttgcgcgatgcggtaagccgctgtctgcgggccgggatgcgcacgctggtactgggcggcgggcatgaaaccgcgtttggacacggcgcgggggtgctggacgcgtttgcgcaggaaagcgtagggatcattaatcttgatgcgcatctggatctccgtcagaccgaccgggcaacatccgggacgccgtttcgtcaactggcgcagctatgcgacgcgcagagccgcgcgtttcattatgcctgtttcggcgtgagccgtgcggcgaatacgcaggcgttgtggcgggaagcgcagtggcggaatgttaccgtggtggaggatctggactgccatgacgcgctggcgcagatggcgcagtttatcgacaaggtggataaaatttatctgactatcgatctcgacgtattgcctgtctgggaaatgccggccgtctccgctcccgcagcgctgggcgtgccgctgatacaggttctgcgtttaattgagccggtttgccgcagcggaaaattacaggcggcggatctggttgagtttaatccacgctttgatgaagatggcgcagcggcgcgcgtggcggcgcggcttggctggcaaatcgcgcactggtggcgttaatctgtcatccggaaaacattatccgcataaggaaggcttcacgcatgtattcatcccgctcccgttctgcacctgcgcctttttacgaaacggtgaaacaggacatctgtaaaaaaatagccggcggcgtctggcagccgcacgatcgcattccgtcggaagcagaactggtcgcccagtatggctttagccgaatgaccatcaatcgggcgctgcgtgagctgacggatgaagggtggctggtgcgtttacagggcgtggggacgtttgtcgccgaaccgaaaggccagtccgcgctgtttgaagtccgcagtatcgccgaggagattgccgcccgccgtcatcagcatcgttgtgaggtgctcacgctggagcgcgtgcgggcaaacgccatccaggccagcgctctcaacgtcaatgagagcgatgtcattttccattccatcatggtgcattatgaaaacgatctgccggtacaaattgaagatcgctgcgtgaatgcggatattgccgtggattacctgacgcaggattacagtcagaccacgccgcacgcttatttgtcgcggatcgcgccgctaacggaaggggaacatattgtggaggcggtgcgcgccacggcgcaagagtgcgcgtggttaactatcaaagagcatgagccttgtctgctcattcgtcgtacaacctggtccgcgtcgcggattgtttctcacgcccgcttacttttccccgggtcgcgctaccggctacagggacgatttatctcctgagcggactgctgccggaaaacgtgattgctgacacaatataacaaaattgtatcatttttgttaattctattcttgtgcttacttgtatagacaagtatatgtctgattcttatctgtgggtctgcggcggtgcctgatagtggcgttttagcgttatttggcgatggcagaccgataataatgaggagtcattgctatgcctgaaagcaagtatcgtcagcagactatccgcgcgcccagaggcacggtattaacggcgaaaagctggctgacagaagccccgctgcggatgttaatgaataatctcgatcctgacgtggcggaaaatccgcatgagctggtggtctacggcgggattggtcgcgccgcgcgcaactgggaatgctatgacgctattgttgatgcgctcacccggctggaggcggacgaaacgttgcttattcagtctggcaaaccggtcggcgtatttaaaacgcacgacaacgcgccgcgggtattaatcgccaactccaacctggttccccactgggcgacatgggaacattttaacgaactggatgcgaaagggctggcgatgtacggtcagatgacggccggaagctggatctatatcggcagtcagggaatcgtgcagggaacatacgaaacctttgtcgaggcggggcgtcagcactataacggcacgctggcgggacgctgggtgctgactgctgggctgggcggcatgggcggcgcgcaaccgctagccgcgacgctggccggagcgtgttcgctgacgattgaatgccagcaaagccgtatcgattttcgtctgcgtactcgttacgtggatgagcaggccgccacgctggatgacgcgctggcccgcattacgcgctacacccgcgaggggaaagccgtgtccgtcgccctgtgcgcgaacgcggcggatatcctgccggaactggttaatcgcggcgtgcgcccggacctggtgaccgatcagaccagcgcccacgatccgctacatggctatttaccctccggctggcgctgggaggagtatcagaaaaacgcgcaatccgatccccacgggacgatgcaggcagcgaaacgttccatggcggcgcatgttcgggcgatgctggcgttcagtaaaatgggcgtgccgacctttgactatggcaacaatattcgtcagatggcgaaagagatgggggtggaaaacgcctttgattttccgggatttgtgccagcctatattcgtccgctgttctgccgtggcatcgggccgtttcgctgggtggcgctgtccggcgatccgcaggatatctataaaaccgatgccaaagtcaaagagatagtggctgaggataaacatctgcatcactggctggatatggcgcgcgagcgcattcattttcaggggttaccggcgcgtatctgctgggtaggcctggagtggcggcaaaaactggggctggcgttcaacgaaatggtgcgttgcggcgaggtatccgcgcccattgtgattggccgcgatcacctggattccggctctgtcgccagccctaaccgtgaaaccgaagcgatgcgcgacggttccgacgcggtttccgactggccgctgttaaatgcgttgctgaataccgccagcggggcgacatgggtatcgctccatcatggcggcggggtgggaatggggttttcgcaacacgccggtatggtgattgtctgtgatggcactgacgaggccgccgcgcgtattcgccgcgtgttacacaacgatccggcgacgggcgtcatgcgccatgccgatgccggatatgatctcgcggtggaatgcgctgttgagcaaggtctgaatttaccgatggttgcggcgacgcaggggaaaggctgatatgaacaccatgacactcactccggggcagttaagtctctctcaactgtacgatatctggcgtcatccggtacagcttcggctggacgccagcgccattgacggcattaacgccagcgtcgcgtgcgtcaatgatatcgttgccgaagggcgtaccgcctacggcatcaacaccggtttcggcctgctggcgcagacgcgcatcgctgatgaagacttgcaaaatctacagcgatcgttggtgctgtctcacgccgcgggcgtaggcgacccactggatgacgcgatggtgcgtctgatcatggtattgaaaatcaatagcctggcgcgcgggttttccgggattcggttgagcgtgatagaggcgctcatcgctctggtgaatgccggcgtgtatccgctgattccggcaaaaggctcggttggcgcgtcgggcgacttagcgccgctggcgcatctgtcgctgacgctgcttggcgaaggaaaagcgcgctggcagggcgaatggcttccggcgcagacggcgctaaaaaaggccggactggagcctgtcgcgctggcggccaaagaggggctggcgctgcttaatggcacccaggcatcaacggccttcgcgctgcgcggtttgtttgaggcacaggagttatttgcctccgccgttgtctgcggcgcgctgactaccgaagccgtactgggatcgcgccgtccttttgatgcgcgcattcatgccgcgcgcggacaacaggggcaaattgacgtcgcgcggttgttccggcacctgctgaccgataccagcgccattgctgaatcacatcaccactgtcataaagttcaggacccgtattcccttcgctgccagccgcaggtaatgggcgcttgtctgacccagttacgtcagacgaaagaggtactgctggctgaggccaacgcggtatccgataatccgctggtctttgccgatgcgggggaggtgatctccggcggtaacttccatgctgaaccggttgccatggcggcggataatctggcgctggcgatagcggaaatcggcgcgctatcggagcggcgcatcgcgctgatgatggataaacatatgtcgcagttaccgccgttcctggtgaaaaatggcggcgttaattccggttttatgattgcccaggtcaccgccgcggcgctcgccagcgagaataaagcgctggcgcacccgcacagcgtggatagcctgccgacctcggcgaatcaggaagatcatgtctcaatggccccggcggcagggcggcgactctgggaaatggcggcgaatacccgcggcatcattgccgtggagtggctggctgcctgtcaggggatagatttacgggaagggttaacctccagcccgttactggaacaggcgcggcagacactgcgcgagcaggtggcgcactatacgcaggatcgttttttcgcgcccgatattgagtgtgcgacggcgctgctggcgcaaggcgcgttacagcgtctggtgccggactttatgtgaatgctgccggatggagcggcgcttattcggcttacccaacccgttggcagggtaagacgtttacgccgccatccggcacagcgtttaactgaacatcgccgtgatcgaggcgctggcgagcgaatggaaatgcacgttaaagccgaccatcgcgccgctggcgtcttcatcaacgtcaagacgctcgacgtccagcgcgtgaaccgtaaagatatagcggtgcgtttcccctttaggcggcgccgcgccgccgtagcccgctttaccgaaatcggtacgcgtctgaatgacgccgtctggtacggccaccaggcctgagccgaacccctgggtcagtacgcgcgtatccgccgggaggttcaccaccacccagtgccaccagccggagccggtcggcgcgtcgggatcgtaacaggtcacgacaaaacttttggtgcccatcggcacgttgtcccaggccagatgcggcgaaatattatcgccatcatagcccataccgttaaaaacgtggcgatgaggaagtttatctccatcgcgcaaatcgttgctgataagtttcatgcgctctccttttgactcaccagaagtgtagccagaagcagcatcgcttaccgctgattaatggctaaaaaatgtttcattgtgtaccgcgtcattgaccgcctgggtcaaacggcgcagttgatccggacgaataatgtagggcggcatcaggtagattagcttgccgaacggcctgatccagacgccttgcccgacgaagaagcgttgaagcgccgccatattgaccggatgcgtggtttcaaccaccccaatcgcgcccaatacccgcacatccgccacccagggcgaactttgcgcgggggctaactcagcgcgtaactgagactcgatagacgccacctgctgacgccattcgccgctttccagcagcgtcaggttggcgcaggcgacggcgcaggccagcggattccccataaacgtcgggccatgcataaaacaccccgcctcgccgttgctaatagtctctgcaacctggcgtgtcgtgagcgttgccgagagggtcatggtgccgccggttaaggctttgccgagacacagaatatccggcgcgatcccggcgtgctcgcaggcgaacagtttgccggtacggccaaacccggtggctatttcatcggcaatcagcagaatgccttcgcgatcgcacatgttacgaatacgcctgagccattgtggatgatatatgcgcatcccgcccgcgccctgaacgataggttccagaatcacggcggctatttcatggcgatgcgcggccatcaggcgggcaaatggcgcgatgtcgctttcatcccattcgccatccatccggctttgcggcgccggcgcgaacagattttccggcagatagcctttccacaagctgtgcatggagttatccggatcgcacaccgacatcgcgccgaacgtgtcgccatgataaccgtggcgaaacgtcagaaaacgctgacgcgattcgccgcgcgcctgccagtattgcagcgccatcttcatggccacttccaccgacaccgacccggagtcggccagaaagacacactccagcggctcaggcgttatcgcgaccagcttacggcacagattcaccgcaggttgatgggttatgccgccgaacatgacatgcgacatggcgtcaatttgcgctttcatcgccgcgttcaattgcgggtggttataaccatgaatggccgcccaccaggaggacatcccctcaatcaggcgtttgcccgaggcgagaaccagctcgcagccttcggcccgctcaacgggatataccggcagcggcgaggtcatggaagtgtaaggatgccaaatatggcgtttatcgaaggccagatcgtccgttgtcataatcgacttgtaaaccaaattaaaaagatttaggtttacgagtctacaccatatcaaaaacaaacaacatattttggagaagcccgatggctcgccacccacgctggacactgtcgcaagtaaccgaattatttgaaaaaccactgctggaattgctgtttgaagcgcagcaaattcatcgccagcatttcgatccgcagcaggtacaggttagtacgctgttgtcgatcaaaaccggcgcctgcccggaggattgtaaatactgcccgcagagctcgcgctataaaaccgggctggaagccgagcgtttaatggaagtagagcaggtactggactccgcccgtaaagcgaaaaacgctggttcgacccgcttctgtatgggggcggcctggaggaatccgcatgaacgcgatatgccttatctggagaagattgtacagggcgtcaaagcgatggggctggaaacctgtatgacgctcggcatgttgaacgagagccaggcgcagcgtctggctaacgccgggctggattactacaaccacaacctcgatacctcgccggagttttacggcaatatcatcactacccgtacctatcaggagcgcctcgacacgctggaaaaagtccgtgaagcagggattaaagtgtgctccggcggcattgtgggtctgggcgaaacggttaccgatcgcgccggactgttgttgcagttggcgaacctgccgacaccgccggaaagcgtgccaatcaacatgctggtgaaggtaaaaggcacgccgcttgcggataacgatgacgtggatgcgtttgattttattcgtactatcgccgtggcgcgcatcatgatgccgacctcatacgtgcgtctttccgcagggcgtgaacagatgaacgagcagacccaggcgatgtgctttatggccggggcgaactcgattttctatggctgcaaattgttaactacgccaaatccggcagaggacaaggatctgcagttattccgtaagctggggctgaatccgcagcagaccagggtgctggcgggcgataacgagcagcagcaacgtctggagcagacgctgatgacgcctgacaccgatgattattacaacgcggcagccttatgagttggcaacaacgcgtcgacgatgcgctgacggcgcgtcgggtgacggatacgttgcgccgccgctatgtggtatcgcagggtgccggacgctggctggtagcgaacgggcgacagtatcttaacttttccagcaatgattacctcggcttaagtcaacatccgcagattattcgcgcctggcaacaggcagcgacgcgttttggcgtcggcagcggcgggtcgggtcatatcagcggttattccgtggcgcaccaggcgttagaggaggaactggcgcaatggttaggatatccacgcgcgctgctgtttatctctggctttgcggcgaatcaggcggtcattaccgccttaatgaaaaaaaatgaccggattgtggccgacaggttgagtcatgcttccctgctggaggccgctaatctgagtccggcgcagcttcgccgctttatccataacgatacgcagcatctgtcgcgtttactgcaatcgccctgcgtgggtcagcaactggtggtgacagaaggtgtatacagcatggacggcgacagcgcgccgctggcggaaatccagcacattgcccgcaggcatcatgcctggctgttggttgatgatgcgcacggcatcggcgtgactggcgatgaggggcggggcacctgctggctgcggggggtgaagcctgagttgctggtggtgactttcggtaaggggtttggcgtcagcggcgcagcggtgctctgctcggaaagcgtcgcggattatctgctgcaatttgcccgtcatctggtttacagcaccagtatgccgcccgcccaggcgcaggcgttaagcgcctcgctggcggtgatccgtagcgatgaaggtggtgaacggcgcgaaaaactcgccgctctggttcagcgctttcgggccggcgttaacgcgtcccgatttacgctactgaatgcccatagcgccatccagccgttaatcgtgggcgataacagccgtgcattgcgcctggcggaggcgctgcgtcaacaaggatgctgggcgacggcgattcgcccgccgacggtgcctgtcggcacggcgcgcctgcgcttaacgttaacgcaggcgcatgaagcgtgtgatatcgaccgtctgctggaggtgctgcatggcgcaggtgaataagcaggctattgcggcggcgtttggccgggccgcatcgcaatatgaacagcacgcctctttgcagcaacacagcgcggatgcgctgctgacgctgttgacaggccgccagtttgccagtgtgttggacgcaggctgcggccccggacgtatgagtcgttactggcgagagcgggggagcgaagtgaccgccctggatctttctctgccgatgctgcaacaggctcgcgatcgtcaggcggcgcatcactatttgctggcggatatcgaagcgattccccatgacgccgaagtttttgacctggcctggagcaacctggcggtccagtggtgtggcgatttacgcgatgcgttgagcgagttgtatcgggttgtacggcccggcggcgtggtggcgtttaccaccttgtgccaggggtcgttgccggagctgcgtcaggcatggcaggccgtcgataatcgcgctcacgcgaatagctttttgccggaagaggccattgaccacgcgctgcgcggctggcgggcgtttcgtcatactcaggcgatgacattgtggtttgaggatgccctgagcgcaatgcgctcgcttaaaggcattggcgccacccatcttcatgaagggcgggagtcggatgtattaacccgcgcccggcttagacagattcaactggcatggccgcagcggcaggggaaatatccgctgacgtaccatctttttatgggagtgattgaacgtgactaaacgctattttgtgaccggtactgatactgaagtcggtaaaacggtcgccagttgcgccttattgcaggccgcaacgcagttaggttatcaaaccgtaggctataagcccgtcgcttccggcagcgaaatgacaaccgacgggctacgcaatagcgatgccctggccttgcagcgtaacagcagcctgccgcaaccttattccgctatcaatccttatacttttgccgagcctacctctccccacatcgttagcgccgacgaaggccgggcgatagacgcggcggtgttatcacgcggattgcgaacgctggaggcgcaggcagactgggtgttgacagaaggggcgggcggctggtttacaccgctctctgccacgctgacgtttgccgactgggtacagacggagcagctgccggtgattctggttgttggcgtcaagctgggctgtattaatcacgccatgctgacggcgctggcggtagaacaggccggattaccgcttgtcggatggatagccaacgacatacagccgccaggcgcgcgtcatggtgaatatctcgcgacgcttcgccgcgtcataccggccccgctattaggggaaatcccgtggctgggcgtttctccatcgcaggcggcgacaggacagtatctggaccttagccccctggaacgcgcctgactgcgcttaaaaactgccttcttgcaggatcagacgatcctgctgttttttcgccagaccttcctgacgtcgccatgctaaaaatgtgcaaaatgtgagcgtctacgcctcaatttttcccttctcgttagccaataatctgccaaaaatagcgataatttttttttatcgcccggcgaaaacgtcaggagctgattttgccaggcggcaggggatacgggctggaagcagttatccactattcctgtggataaccttgtgtattagagttagaaaacacaacgtaagcgagaggcgacgcggcctgcgactaaattggcgcgaaagacggcttgagaaaatatcccttttcagacagcaagttatataaaatcaatggttgtaaaggaagggggatacgttgacataaaactttcatcatccgacttgacaaatgttaaaaaagactctggtctggggataaccagcacactgctggaattttaccccgcgactgtctatgttttacctctaaatagcgtggggtatctgccgatagccattatacactggagtgttactgttttttcatccagtattttttattggcaatattcaccgtcgagagtaaaattacacccctgcccgctcactccttcaggtagccgctcatgagtaaaccgttcaaactgaattccgcttttaaaccttctggcgatcagccggacgctatacgtcgtctggaagaggggctggaggacgggctggcgcatcagacgttattgggcgtgaccggctccgggaagacattcaccattgccaacgtcattgcggacttgcagcggccaacgatggtgcttgcgcccaataaaaccctggcggcgcagctctacggcgaaatgaaagagtttttcccggaaaacgcggtcgagtatttcgtctcctactatgactactatcagccggaagcgtatgtgccaagctcggatacgtttatcgaaaaagacgcttcggtaaacgaacatattgagcaaatgcggttgtcggcaacgaaagcgttgcttgagcgacgcgatgtcgtggtggtggcttccgtgtccgcgatttacggtctgggcgatccggatctctacctgaaaatgatgctgcatctgacggtgggaatgctgattgaccagcgcgcgattttgcgtcggctggcggaattgcaatacacccgtaacgatcaagcttttcagcgtggtacctttcgcgtgcgcggcgaagtgatcgacatcttcccggctgaatctgacgacatcgcgctacgcgttgagctgtttgatgaagaagtggaacgcctgtcgctgttcgacccgttaaccgggcaggtagagtcaacggtgccacgttatactatctatcccaaaacgcactacgtaacgccgcgcgagcgtattctgcaggcgatggaagagataaaagatgagctggcggacaggcgtaaggtcttgctggcgaataataagctgctcgaagagcagcgattaagccagcgcacgcagttcgatttagagatgatgaacgagctgggctactgctcaggcattgaaaactattcccgctttctgtcgggccgcgggccgggcgaaccgccgccaaccttgttcgattatctgcccgccgacggactgctggtggttgatgagtctcatgtcaccatcccgcagataggtggcatgtaccgcggcgaccgggcgcgcaaagagacgctggtcgagtatggcttccgtctgccttcggcgctggataaccgtccgctgaagtttgaggagtttgaagccttagcgccgcaaactatctatgtttccgccacgcccggcaactatgagctggaaaaatctggtgatgaggtggtggatcaggtcgtgcgaccgaccgggctgctggacccgattattgaagtgcgtccggtggcgacccaggtggacgatctgctgtccgaaattcgtcagcgtgcggccattaatgagcgtgtccttgtcactacgcttaccaaacggatggcggaagatttgaccgaatatctggaagagcacggcgagcgcgtgcgttacctgcactcagatattgataccgtggagcgcatggaaatcatccgcgatttgcgtctgggcgagtttgacgttctggtggggattaacctgctgcgcgaagggctggatatgccggaagtctcgctggtggcgattctggacgccgataaagagggcttcctgcgctccgagcgctccctgattcagaccatagggcgcgcggcgcgtaacgttaacggtaaagcgattctgtatggcgataaaatcacgccgtcgatggcgaaggcgattggcgaaaccgagcgacgtcgcgagaagcagcagaagtacaacgaagagcacggtatcactccgcaggggctgaacaaaaaagtggtcgacatcctggcgctggggcagaacattgcgaaaaccaaagcgaaggggaaaggcaagggccgttctacggcaaaagccggaattgtcgaactggatatgacgccgaaagcgttgcagcagaaaattcatgaactggaagggcaaatgatgcagcacgcgcaaaatctggagtttgaagaagccgcgcaaattcgcgaccagttgcaccagttacgcgagttgtttatcgcggcgtcctgacaatgtgtcgatcgccagcgagtcatcgttaccatggctcgcttttgagaatttcagtgcaatagtaagggctaagtcagtcaggaatgaaaaacagtgacaggctttgactaacgggattgtcgaaaaactcaaaacatcaatggggtagctagtttaatcacaactgaagaaaattagcgttgaggctgaacccaacgctaattttccctctctcctcggctatgaaaaaaaacgccccgtattatcggtatagctatccttatgatcgtcattttaatcttatatgagttcgttgaaagcgtgtcatggcaacagattacatcattctacttaaaaaagaggtgatggaagcgcgagcatctataagtcaagcgctgcaaatactgaatgatttgtccgaaataatgacgactgtgacctcttatttaaagttgagaatatccttatctgttactttaggttacgttcagatcaggtagggaaaatatgtttaatattactaatatacaatctacggcaaggcatcaaagtattagcaatgaggcctcaacagaggtgcctttaaaagaagagatatggaataaaataagtgcctttttctcttcagaacatcaggttgaagcacaaaactgcatcgcttatctttgtcatccacctgaaaccgcctcgccagaagagatcaaaagcaagtttgaatgtttaaggatgttagctttcccggcgtatgcggataatattcagtatagtagaggaggggcagaccaatactgtattttgagtgaaaatagtcaggaaattctgtctatagtttttaatacagagggctataccgttgagggagggggaaagtcagtcacctatacccgtgtgacagaaagcgagcaggcgagtagcgcttccggctccaaagatgctgtgaattatgagttaatctggtctgagtgggtaaaagaggcgccagcgaaagaggcagcaaatcgtgaagaagccgtacaacggatgcgtgactgcctgaaaaataataagacggaacttcgtctgaaaatattaggacttaccactatacctgcctatattcctgagcagataactactctgatactcgataacaatgaactgaaaagtttgccggaaaatttacagggaaatataaagaccctgtatgccaacagtaatcagctaaccagtatccctgccacgttaccggataccatacaggaaatggagctgagcattaaccgtattactgaattgccggaacgtttgccttcagcgcttcaatcgctggatcttttccataataaaattagttgcttacctgaaaatctacctgaggaacttcggtacctgagcgtttatgataacagcataaggacactgccagcacatcttccgtcagagattacccatttgaatgtgcagagtaattcgttaaccgctttgcctgaaacattgccgccgggcctgaagactctggaggccggcgaaaatgccttaaccagtctgcccgcatcgttaccaccagaattacaggtcctggatgtaagtaaaaatcagattacggttctgcctgaaacacttcctcccacgataacaacgctggatgtttcccgtaacgcattgactaatctaccggaaaacctcccggcggcattacaaataatgcaggcctctcgcaataacctggtccgtctcccggagtcgttaccccattttcgtggtgaaggacctcaacctacaagaataatcgtagaatataatcctttttcagaacgaacaatacagaatatgcagcggctaatgtcctctgtagattatcagggaccccgggtattgtttgccatgggcgacttttcaattgttcgggtaactcgaccactgcatcaagctgtccaggggtggctaaccagtctcgaggaggaagacgtcaaccaatggcgggcgtttgaggcagaggcaaacgcggcggctttcagcggattcctggactatcttggtgatacgcagaatacccgacacccggattttaaggaacaagtctccgcctggctaatgcgcctggctgaagatagcgcactaagagaaaccgtatttattatagcgatgaatgcaacgataagctgtgaagatcgggtcacactggcataccaccaaatgcaggaagcgacgttggttcatgatgctgaaagaggcgcctttgatagccacttagcggaactgattatggcggggcgtgaaatctttcggctggagcaaatagaatcgctcgccagagaaaaggtaaaacggctgttttttattgacgaagtcgaagtatttctggggtttcagaatcagttacgagagtcgctgtcgctgacaacaatgacccgggatatgcgattttataacgtttcgggtatcactgagtctgacctggacgaggcggaaataaggataaaaatggctgaaaatagggattttcacaaatggtttgcgctgtgggggccgtggcataaagtgctggagcgcatagcgccagaagagtggcgtgaaatgatggctaaaagggatgagtgtattgaaacggatgagtatcagagccgggtcaatgctgaactggaagatttaagaatagcagacgactctgacgcagagcgtactactgaggtacagatggatgcagagcgtgctattgggataaaaataatggaagagatcaatcagaccctctttactgagatcatggagaatatattgctgaaaaaagaggtgagctcgctcatgagcgcctactggcgatagctgaacgcagtttatcagaagagggagagagcctgtttacccttcggtgtaaacaggcttctgataagcgcagcgtcgtcggtaaacgggcttaacccaacgcctgtagcgctttttccagcgcattatgtaataactgacgatcgtggcgataggggatatcgctggcctccagcacttcctgaatcaccagccgatcgttcaccgcactgacgtcaactcgcggcccaaccactactgcgtcaatgacttttttgccaatatattgctccatcatcgccagcttatcgaccagcgttaaactggcggcgggcagactcagttcgcgacccagattgccgatatacaccattggcgctggggtgcgccgcagcgcctgcgccagttcatccagcagcaggcaaggcatcaggctggtataaaaactgccagggccaatcagaatcagatccgcgtcattaatggcctgtaccgcttcccgcgtcgccggaacgtttggcgttaacatgatctcctgcggcggcgtcgctaactgatcgatattcacctcgccataaatctcatgcccctgatcgtcaatcgccatcagatctaccggtagctccgacatcgggatcagctgcgcgtccactttaagcagattacgaattaaattaatcgcttccagaggccgcacgctcaggtgatctaacgcctttaacatcaaatttccgaggttatgaccagaaagttcgccattaccgccaaaacgatactcaaacatagcggacgcgacgctaggttcggtaattaactgattcagacagttgcgcatatcgccccaggcgatcccgccttccgagcggcgaatacggccagttgaccccccgttatctgtggtagtcacaatgccggtcaggcgcgaacctaatgaagaaagcgaggagaggacgcgtcctaatccatgccctccgccgagggcaacgacacgatcaaggtcagccagcgtacgattgcgcataaaaattcctgaagtcaaataagcagcgctacagtagcgcaagtcgcgggttttcagcaattagccgaccggctaaaagacaattaattattcccgactacccctttatagcgagggcgttaccacggctaaatgatatatatcaatgtaaaagtgtgattttcacgtattctgtcgctaaatagcacgatcatatcgctatgtatatgtttatatagcgaaagcgtgatggcgaaattgtcatttacacgctagtatcggcgtaaccacagtaaacactctagcctctgcacctgggtcatttttgatacggtgctttggccgtgacaacgtttaacgtttgccaccagggcgcaggaagaaatgactccgcctcccgtatttggaaaggtgtacatggcttcacaacttaccgatgctttcgcgcgtaagttttactacttgcgtttgtcgattaccgatgtgtgtaactttcgttgcacctactgtctgccggatggctacaaacctggcggcgtcactaacaacggtttccttaccgtcgatgaaattcgtcgcgttacgcgcgcttttgccagtcttggcacggagaaggtgcgtcttaccggcggcgagccttcattacgccgcgattttaccgacatcattgccgccgtgggtgaaaatgatgctattcgccagatcgcggtgaccactaacggttatcgactggcgcgcgatgccgcgaactggcgcgaagcggggctgacgggcgtcaatgttagcgtggatagtctggatgcgcgtcagttccatgcgattaccggtcaggacaaattccgccaggtgatggcgggcatcgatgccgcctttgacgccggtttcgaaaaggtgaaagtcaacaccgtgctgatgcgcgacgtgaatcaccatcagttggataccttccttgcctggattcagcctcgccccattcagctacgcttcattgaacttatggagacgggcgaggggagcgatctcttccgcaaacatcatatttcgggtcaggtattacgcgacgagctgattaagcgcggttggatccaccagctccgccagcgcagcgatggcccggcgcaggttttttgtcatcccgattacgccggtgagatcggcctcattatgccgtatgaaaaagatttctgcgccacctgtaaccgcctgcgtgtttcgtccgtcggtaagctgcatttatgtctgtttggcgacggcggcgtgagtttacgcgacctgttacaggatgacgcgcagcaatacgcgcttgaggaacgtatttccgacgcgttgcgggagaaaaagcagacccactttcttcaccagagcaatactggtattacgcaaaatttatcttacattggcggttaatccttaataaggagatttcagatgagtcaggtcagcgctgaatttatcccgacccgcatcgctattcttactgtttccagccgacgcggcgaagaagacgacacctccggtcattatctgcgtgattcggcgcaggaggccgggcatgaagtggtggcgaaagccatcgttaaagagaaccgttacgcgattcgcgcccaggtttccgcctggatcgccagtgatgaggtgcaggtcgtattgataactggtgggaccggtttgaccgaaggcgatcaggcgccggaagcgctgttgccgctgttcgatcgtgaagtggaaggatttggcgaagtgtttcgcatgctctcgtttgaagagatcggcaccgcaactctgcagtcgcgcgcggtagctggcgtggcgaataacaccttgattttcgccatgccgggctccacaaaagcgtgcagaaccgcatgggagaatatcattgcgccgcagctggatgcccgtacacgcccatgtaattttcaccctcatttaaagaaataacgatgtcgcaattaacccatataaacgccgcaggcgaagcgcacatggtggacgtttccgcgaaagcggaaaccgttcgtgaagcgcgtgcggaagcattcgttaccatgcgtagtgaaacgctggcgatgattgttgatggcaaacaccacaagggcgatgttttcgccaccgcccgaattgccggtattcaggccgccaaacgcacctgggagctgatcccgctgtgccacccgctactgctaagtaaagtggagattcagcttcaggccgagccggagcataaccgcgtgcgtattgagtctctgtgccgtctgaccggtaaaaccggcgtcgaaatggaagcgttaaccgcggcgtccgtcgcggcgttaaccatctacgacatgtgcaaagcggtacaaaaagatatggtaattggtccggtgcgcctgctggcgaaaagcggcggcaaatcgggggattttaaggtggatgcgcatgattaaagtgcttttcttcgcccaggttcgcgagcttacaggaactgacgcgctggatcttccagcagatttttccaccgttgagtcgctgcgacagcatctggcgacaaagagcgatcgttgggcgctggcgctggaagatggcaagctgttggcggcggtcaaccagacgctggtaagttttgaccatccgctgacggcgggcgatgaagtggcgtttttcccgccagtcacggggggctaacatgcacgaaacgcgaattgtagtcggccctgcgccgtttagcgtcggggaggaatattcctggctggcggcgcgcgacgaagacggcgcggtcgtcacctttaccggaaaagtgcgcaatcataacctgggcgatagcgttaaggcgctgacgctggagcattatcccggcatgactgagaaagctctggcggagatcgtcgcaaaggcgcgttcccgctggccgctggggcgggtcacggtgattcatcgcgttggcgaattatggccgggcgatgagattgtgtttgtcggcgtcaccagcgcgcaccgcagtagcgcgttcgacgccggtcagttcattatggattatctgaaaacccgtgcgccgttctggaagcgtgaagccacgccggaaggcgatcgctgggtcgaagcgcgcgacagcgaccagcagttggcgaaacgttggtagcagaatgtgatacgctttagggtatcatttccacacaggagttcatcatggacagatttccacgatctgattcaatagtgcaggcgcggtccggcctgcagacctatatggcgcaagtgtatggctggatgacggtcggactgttactgaccgcgtttatcgcgtggtatgcggctaatacgccagccgtcatgatgtttgtcttttccagtaagatcactttctttggcttaattattgcccagcttgcgctggtgtttgttctgtcgggactggtgcataaacttagcgccggaatggcgacgacgctgtttatgctctattcggcgctaaccggattgacgttatccagtatttttatcgtttacacctactcctctatcgccagcacgtttgtggtgacggggggaatgtttggcgccatgagcctgtacgggtacaccactaaacgcgatcttagcggtttcggcaatatgctgtttatggcgcttattggtatcgttctggcgtcgctggtcaatttctggctgaagagtgaagcgctgatgtgggcggtaacctatatcggggtggtggtgtttgtcggtctgaccgcctatgacacgcagaaactgaaaaatatcggcgagcaaatagatacccgagatagcgctaatctgcgtaaatattcgattctcggcgcgttaacgctgtacctggactttatcaacctgttcctgatgttactgcgtatttttggtaatcgccgctaattatagcgatctcttaaaatcctggccctgcgccaggattttttttgtctatggaaaacccccagctaggctgggggttccggaaagctttcagctttaagccagttattaaaaccccttttgatttgttaaaacatcttgcggtctggcaactgcaaaagttcaacaagaaatcaaaagggggtcccaatgggggacgaaaagagcttagcgcacacccgatggaactgtaaatatcacatagttttcgcgcccaaataccgaagacaagcgttctatggagagaagcgtagggcagtaggcagcatattaagaaaattgtgtgaatggaaaaacgtacgaattctggaagcagaatgttgtgcagatcatattcacatgcttctggagatcccgccgaagatgagtgtgtcgagtttcatgggatatctgaagggtaaaagtagtctgatgctttacgagcagtttggggatctaaaattcaaatacaggaacagggagttctggtgcagagggtactatgtcgatacggtgggtaagaacacggcgaagatacaggactacataaagcaccagcttgaagaggataaaatgggtgagcaattatcgatcccgtatccgggcagcccgtttacgggccgtaagtaacgaagtttgatgcaaatgtcagatcgtatgcgcctgttagggcgcggctggtaagagagccttataggcgcatctgaaaaacctccggctatgccggaggatatttattaggactatatttagggcgaaacagcataaatatcttagaaatgttttcctacgcttgccattcttatcaccgtgatcatgtgaagagtgataaatgacaagtgggacctctggctgcaatacgtatacgacaaatagcatttattccctcgacaatgttatcccttacctattggtatactgcgttgggactatggtgtaccgccggcattatatggttaacgttgtatagtcattttttaataacccacgttcaacctgttgttgttttgtggatatcagcacttttgcttggcctggggtatggggccattacctgtctttcccgctttggcactgttgtcgcaacgttgatatatattgccatcattacgcttaccggcgtgtcattagcttaccttttctcaggtggcgcgaccattttcgtgattgttggaatcatgtttagtcttaatgccttatttattttctacctgaatatcagttctggtctattcaggccgttaatttttatggcggtaagcgggatcatcgctgcgatagttgtcaatagcctggtggccagtagcactctggtctggatagtcagtgtgctgacggtattggtatggacattgattacagcactagaaaaatcgacacttcatggttatgcccgcatgttataccacagcgagttttcatcgctgcctcgttgcgctttatttggcgcgctgacgctttaccttggcattattaatgctgtggttacgctgtgtcgttatatcattttgatgattctggaaatactattatctttcaggccgtaggcgttgcaggttttttattcaggttggtgatgatgggtataatgagtaaattatgtggcaaacaattttggttagcgttttgtgaagctaaagacgtcactcgcgccattaaaaatggcggcgaggattttaataagaaatgcccaccagcgctgatttctcatttcattaccggattgtcatgggaacattcattacccaatcctgcgcctgtttgcgcgtttagttttatgcttcttgtgggaggtgtgtgcagtgcgcattttgtttttgataagtttatcctgtattggccactaaatataattatttattttggcagtgctataggtattatgctatgtgttatggccgaggtatggcttattgccaaaggctttattctggggttgcgcctctgcgttttactgtttttgttaaatattatgctctgcggtactggattatttgacgtgttgtgccatcaaaatagcgaactaaagagtgatcttgttatcgcgattattatggttgtgctttgccgctgggtgatgaatggcgaaacgtttacgatgatgattcgtttctgcctggggcgtcgattagtgcgagttgcattacaaaaatatctcacctcacagacaaggaaatgataagcccatgaacctgatgacgtggctaacaggaaaaacactggcggagctggtgaaaaaagggcagttgatcccgccagaaattaagttacctgtgtatccggccagccactacaaaaaaaactggtatgaacaaggtattcctcacggaggcgttattgggcttacggcgatcatgatgaccatgacatggatcgtcagtataaacatggttattgcgcagtttgagctgcacaataaaaagcatctggagctggtcttcttcctggccgtgggctatatcgcttttcttaccccgtcaaatcagctcctgcttaaaggaagaatgagcggggttattatttaccgctatgcgctattactggtcattatttccgttacgttggcaacgttctgtaccctgtcatcagtattcatgggcgagtttcacgaagtgctcctgctgctgtttagctggtcattgctgcttttttcccgcttacagatgaatacgtcttttttctcagcatatgtttatttttaccggataaaacgcgttgtgctggaaagcgaaaacgcgtctgcttaaatttatttcgccatcgcccgctcgtttttcgcccgcagcttcttcgcccggctctccaggatcagatagcacaccagcgccagcaacaggggaataaaatagtaaagcacgcggtatgcgagcagggcggcgataatcgtgccttgcgacgtatgttcgcccgccagcaacgcaaggaatacggcctccagcacgccgatgcctgccggaatatgcacgatgacgcccgcgatactgctcaccagcagtacgcccagcacaaagaaatagttcacatcctgacccatcagcagccagatgatggcgcccatcgccatccagttcgcgctggagatcgccatctgcgccagcgcgaatttccatgacggcagcaccagtttctgtcctttaatcgtcatatgccgccgcttcgcaaaggcgcaaaaccacagatagaccgcgataatcaacaataaaacgataccgagaattcgtagcgtgcctgcatcgatataccagtggtcgggaagctggacaatgccgaaggtaaaaatgatgccgccaagcagaatatagcccagccagttagtggtaatgctgagtgagaaaatgcgcgtgatagtactgccgggcaacccgaggcgagagtatagtcggtaacgcatcccgatcccgccgacccaggtgctgagcgtcaggttaaaggcatagcagacgaacgataccaacatcacctgtcgcttcgccagtttatggccgcaataaagccgtccaagcaggtcgtagcagccgtacagaagatagctaacgatcaccagtcccacagcgcttaaaagcgccgtgcggttatagtcacggatgacggtccagacatcgccccagtcgacctttttagcataaaccaccagcagaacgacgaccgcaataaaaaacagccaggtcagcacttttttagccagccgccagcgcggatgcgatttagccattagggcttcactcctgtattttctggatcaacgcgatcctgggtttccatttctggctgggcaggcgggggaacctgcgccagatgcggggtatgcgccggtagccagccgaccagcgccgggaaatgacgtaaaaagtggaacgccagcacgcttttggtcaggttccaccaggtgcgtttcggcagcatagactcatcgacctgcttacaatcgttcacgatgatgccttgtaagttatcgcgcagggtctggttaaaagtacgatcgtgaatgatcaggttagcttcaaggttaagcgacaggctgagcggatcgagattactcgaccctaccgtggcccagtgatcgtccatcagcgccactttgccatgcagcggacgtcgtcggtattcataaacctgcacaccgcccttcaccagatagttatagagcaaccgcgcgccgactttgactatcggcatgtctggttccccctggacaatcagttttacgctcacgccacggcgggcggctttacgcattgcgtggagcaagcgatagccggggaaaaaataggcgttagcgataatcacttcacgctttgcctgggtcagcattttcagataatgacgttcgatatcgtcgcggtgttcttcattatcccgccagacaaacagcgcctgcgcttcgccggggtggcgattttcttcagcctgatgatggcgcttccaccagcggcgcgcggggctttgccccggcagattctcgacttcgaattgcaggatatcggccactacaggcccttcgacccgtaccgcgtagtcttgtttcgcctgcgggccgtaatccgacatatgttcggcggagtagttaatgccgccgacaaaggcaatacgatcatcaatcaccacaattttgcggtgcattcggcggaagatattggttcgcaaccccagtagacgcgggcgggggtcgtaatagcgaaaaatcacgcccgctgaggtcaattcgccgacaaacgcgtcgctgagatcgggagagccgtagccgtcgagtaatacttcggcttttacgccgcgctgtgcggcttttagcagagcggtatggagttttttacccacctcatcttcaaacaagataaaggtttccagaatgattttttgctgtgcctgagcgatagcctcaaacacggcaggatagaactggtcgccgttttccagtagctgaatttgattaccttcacgccagccgcatttcatagatggatctccgcgctaaggggggcatggtctgataaatgtcgccagttccgcagcggcagcgccgtaggagaactggcgttcgcattcttgacgtaaatacgatcgagtcgcagcagcggcatactcaccgggaatgtgcgcgccggtcggccatgggcacgggtgaatatctcctccagcccggccgcgtttaacggcgggccggccttttgccgccagtcattaaagtctccggccaccagcaccggttctgattccggcaaggcattcacccatcccgccagcatggttagctgtgcctggcggtgactctcccgcaggccgagatgtacgcacatgacgtggatagggcggttgagcatgggcggcgtaatgcggcaatagagcacgccgcgtttttcgctaccgccgaccgagacgtcgcgattttcataatgttcaatgggatagcgagaaagaaccgcgttaccgtgatggccttccggatagaccgcattgcggccataggcgaaatcgctccacatggtgtcggccaaaaattcatagtgggtagtgtccggccagttttcgatatgcagcggatgtacttcatgcgcgcccatcacttcttgcagacagacgatatcggcgccgaccgttctgacagcgtcgcgcagctccggcaggatgaagcgtttattaaaggcggtaaaacctttgtgcgtattaattgtgagcactttgaatgaaaaatttcgcgtgtgttgagtcattttcttcctgtccgcgtcactatcctgattgaaatagtgtagtcgtcgtcacaaaaagatgcggtcttacggaattttccgtaaagttcggtactctgaataatgagagaaaaatgcttcaggagaaaagccatgaagtggcaacaacgcgttcgtgtcgcaaccggcctcggttgttggcagattatgttgcatttactggtagtggcaatgctggtaataggctggatgagcggcacattagtgcgcgtcggcctgggattatgcgtgctttatggcgtgacggtactgctgatgctggcgttgcagcgccatcatgagcaacgctggcgcgatgtggcggatgtgctggaagagctgactaccacctggtacttcggcaccgcgctgattgtcctctggctgctatcccgcgtcttgcaaaacaatgttttactggcgctggcggggctggctatcctggccgggcccgccgtggtctcgctactggcgaaagataaaaagctacatcactttgcgtctaaacatcgcatacgccgctgaacccgtggtggccgctatcaccagtagcggccacaaacttccccagacaatccccagactcgcgtccttaagataaatttgcttagtaatatcagtaaagtggcggataggatttatccacgtcaggttttgcagccagaccggcatattttccaccggcgagacataacccgagagcaaaatcgccggcatcataaagacaaagacgccgataaacgcctgctgttgcgtggcgcaaagcgatgatatcagcaagccaaagcctaccagcgacagcccgtaaatcaccatcgtgaaataaaacagcgctaacgaaccggcgaagggaatttggtatgcccaaatgccgatagccagcacgatcgtggcctggaaggtcgcgacaatcagcgccggcaccgctttaccaacgaaaatctgccaggtggtgagcggagagaccagcagctgatccagagtgccttgttcacgttcgcgggcgacggacagcgaagtgacgatcatcacgccgatagtggtgatcatggcgatcagcgagggcaccacaaaccacttgtagtccagattcgggttataccagttgcgtaccaccagttcgctattgttgggctttggcttgccgtccatcaatgtctgctgatactccttgacgatctgttgcagataattggcggcgatttgcgcgctgttggagttacgtccatcaagaatgagttgcatcggcgcaggctggaaggtatccagattccgcgagaaatccgccgggaagcgtaccagcagtagcgctttttgcgtatcgatagtcggctggatctcctgcggactgttcagcaatagcacatgggtaaacgctttcgcgcgggcaaagcgctgggtaagttctaccgaatgtttgccgttatcttcgttatagatggcgatagtcgcgttagtgacttcaagcgtcgcggcgaacggaaacaggatgacctgaatcagcaccggcagaatcaggatcgcgcgcgtttgcggttcgcgtaaaagcgattgcagttctttgcgaattaacgtccataagcgatgaaacatgtccgtcctctcagtccagtttgtaggcctgataagcaaagcgcatcaggcataatgccggatggcggcgtgaacgccttatccggcctacgacgacaattatccatacacatatttaatccagccgtcgtttggtttttagccacgtcaggccaataaacatcaccgccgaggcgattaaaaacagtacgttaacgcctaacacgaccggaatattgccggccagaaacagactttgcagggtgctgacaaaatagcgcgccggaataatataggtcaccgcgcggatcaccgcaggcatactgtctatctggaagataaatccggacagcataatcgagggcaaaaacgcggcgttcagcgccacctgcgcggcgttaaactggttgcgagtgatggtggaaatcaacagccccatccccagcgtactcagtaaaaacagactggtgatgataaacagaatcaccagcgaaccgcgatacggcacgccgagaataaacaccgataccagcatacagagcagcatcgccagcataccgagaaagtaatagggaataagcttacacagcagcagttcaacacgcgtcacttcggttgagagcagcgcctccatcgtgccgcgctcccattcgcgggcaacgaccagcgaggtgaggattgcgccaattaccgtcatgataatggtcaccgccccgggaataataaaatgctgactgatcgccgccgggttaaaccagtagcgcgtctggacgtcgatgagcggttcaaaggtgtcgccgcgatcttccgcgcgctgctgttgccagatttgccagatgccttccacataaccctgaacgaagttggcggtgtttggctcgctgccgtcggtaatcacctgaatcggcgcgctgtcaccgtcgcgcgccatttgctgcgcgaaatccaccggaatcaccaccagtccgcgaatgcgtccggcctgcattttttcaattaattcatggcggttatcgctaatggtcgcgtcgatatagggtgaaccggtcatcgcatgagtgaaatccagcgcctcctggctttgttgttcaagcagaatccccacccgcagtttgctggagtcgaggttaatgccgtaaccaaaaataaacagcaacagcagcgggatcaccaccgcaatcagccagctactgggatcgcgcacgatctggcgcgtctctttgacgcacaacgcacgcacgcggcgccaggagagagacttactcatgcgtatgctccttatcccagtcattgatgagagtgataaaggcctgctccatcgttggatcggcctgttgctcatcggcggcctgcgctttgagatcgtccggcgtaccgctggcgataagcttcccgcgataaaccagtccgatgcgatcgcaatattccgcctcatccataaagtgggtcgtcaccattaccgtgacccctttttccaccatgctattaatatgcagccaaaattcacggcgggtgaggggatcaaccccggacgttggttcatcaaggaataaaatatccggttcgtgcatcagcgagcaggccagcgccagtcgctgtttaaagcccagcggcagcgcatcggtgggatgcgacgcgatgcttttcagaccaaacgcttcactcatgcgctgaattttttcattttgcgcgcggccccgcaaaccgtagacgccggagaaaaaacgcaggttctgctcaaccgtcaggttgccgtaaagcgaaaatttttgcgccatatagcccagatgctgacgggctttgccggagctgactttcaggtccatatccagcaccagcgccttgccggacgtcggcaccagcaggccgcacatcattttaaaggtggttgatttacccgcgccgttcgggccgagcaggccaaaaatctcgccgcgctgtacgacgaaattaacatggtccgtagccgcgaaatcgccaaattttttcgtcagttcctgcgcttcaatcaccgtttcgccggcagtgccttcaaccgtatgcaggattgaacccagcggagactccgaggttcccgctccgccaagcagatcgataaacgcatcttcgaagcgcggcgcggtctcattgagggtgatttccggcatcccttcggcctggcgaatatctgctgcggtcgcctcttttttcaggatcaggcgtaccgaacgtccctgaatcatgccgtcgctcacctgcggcagtctgagcgctctctgtagcaacttacggttgttttcctgtggactactcatcagaaagctacgaccggccatcgtttgcgtcagcgctttaggttcgccctgatagagcagctcgccttcattcatcagcagcacatcgcgacactgttcggcttcatccagataggaggtgctccataaaatcagcatcccgtcgcccgccagttcgtgaaccatttgccacaactcgcgccgtgaaatcgggtcaacgccaacgcccggttcatccaacagcagcactttcggttcgccgaccagcgtacaggccagccccagtttttgcttcatcccgccggacaatttccccgccagacggccagtgaaagggccgagggcggtaaattccaacaaacgggcaaaggtcttttcccgtatctcgccggtaacgctgcgtaaatcggcatagagattaaggttctccatgacggtaagatcttcatacagaccaaatttctgcggcatatagcccagaaccgcgtgcagctcgctgtcgttttgtatcgggtcgaagcccaatacggacgcgctgccgccatcggctttgagcaggcctgccagcatacgcattagcgtggtttttcctgcgccgtccggccctaccagcccggtgacataaccggaatgaatggtacagtcgagcggcgcgacggcgggtttatccattcccgcaaagcgcttcgtcagaccgtgcagcgtaataacggcctcactcatgccgtgcctcgtcattaaatttcaccgtgactggcatcccctggcgtaacgcatcgtccgcatcggtgacgataatgcgcaggcgatagacgagatcggtacgcagatccggcgtttcgacggttttcggcgtaaattccgcggtgggcgaaacgaaaccaatcttgccgtggtaaggtttgtcaggacgaccgtcggtatacaacagaatgtcgcgccccggttgcgtctgactgaggttgcgttcatcgacataggcgcgcacccagacggggcgggtcagcgagagcgttaataccgtgctgccggcgttcagcatactgccaggctcgaccgcgcgggtgagcaaggttccgttggcaggcgcgataagcgtggtgtcctgcaaatcaagctgcgcctgcgccagttgggcctttgcctgttccaggctggctttcgcctgggcgatatcctgttcacgattaccggtacggtactggctcagtttatcctgcgcggacttcagcgtcgcctgcgcctgatcgcgcgatgagcgggcgttttccagatcgttagcggaaatggtgcggcttttccacaatccttgctgacggttataaaagttttgtgcgtagtcataggcggcttgcgcctgtctgacggcggcggcggcctgggctatctcttcatcgcgatagcctgccagcatcaaatcatattgcgcctgcgcgaccgacacgccagctttcgcctgcatcagcgcgttttcgtatggcgcgtgatccagttcgccgagcacctgtccggctttgatagtatcgccttcatcaacattcagcgacgccagcctgccgccgacgcgaaagctgatattgacggtacggatatcgacattaccgtatagcgtcagcccatcgtcctgccgactttgataccaccaggttccaccggcaatcacagcgacgatcgctgcgattgccagtccgataacgacaggttttttcatcagtccagactcctttgcgttaaaccgtgcagaataagatcgatgtggcaggttaccgtctggtaaatcagctccgctttttcttcatcaaactgcggccagccggtacgtaacagaatagtttctttgccgagacgaaacgccagcacttcgcccagtaaggcatgggtatgcaaaatcatgcgcgtatcattggcgtcgcagccggtataagcggcaaccaatcttgtcagatgggtgtgcaacggatcgataacctgttcatggaccaattgataggccgacgtgggagagagctgctcgcgtgaaataaatttgctcaggttaacggtgtcttcctgcgtcagcagcataatcatgttcttgcaggcgagcagaatgagttcgcgtatggcgtcccggtcaggggcaggctggctaaacagacgctccgctttttcagcatgcgggcgaaatttttcgccaagaaaatcggcaatccactgggcgcaggcgaggtataaatcctcttttgagccgaaatagtaagtaatggcggcaatattttgccccgccagcgcggcgatatcgcgcgtggtggcatggaggccatactcgccaaactgcgccagcgcggcggcaatgagctgacttttcgcctgctcgcccttggtggtcgtggtgggaatattcatcacacgccctaatttttaatcaatcgattgattaagactatgactcataatggcacttgtccagtgtggtcgattaatttgtctttgctaccttccgggataatttatgcgccgcatcacaaaaactgctacactccgccccttcatgacattgtggtttttgtcattccaaatttgagcatctccctgaaaactacaccggcaacggtcggggcggtccggagtagttatgtcttttgattccctgggattaaaccctgatatcctgcgcgccattgccgagcagggttaccgtgaacctacccctattcagcaacaggcgattcccgccgtgctggaaggccgcgatctgatggccagcgcccagaccggaaccggtaaaacggcgggttttaccctgccattgttgcagcatctgattacccatcagccgcatgctaaaggtcgtcgcccggtgcgtgcgttgatcctcacgccaacccgcgagctggcggcgcaaattggcgaaaacgtcagagattacagtaaatatctcaatattcgctcgctggtggtatttggcggcgtaagcatcaatccgcagatgatgaaactgcgcggcggcgtggatgtgctggtggcgacgccgggacgtctgctcgacctggaacatcaaaatgccgtgaagctggatcagattgagattctggtactggatgaagccgaccgtatgctggatatgggcttcattcacgacattcgtcgcgtgctggcgaaactgccggcgaagcgtcagaatctgctgttctccgccacgttctctgacgacatcaaagcgctcgccgaaaagctgttgcgcaacccgctggaaatcgaagtggcgcgccgcaacacggcctcagagcaggtaacgcagcacgtgcactttgtcgataaaaaacgcaaacgtgaactgttgtcgcagatgattggccagggcaactggcagcaggtgttggtcttcacccgcaccaagcatggcgcgaaccatctggcggaacagcttaataaagacggtattcgcagcgcggcgatccacggtaataaatcgcagggcgcacgtacccgcgcgctggccgattttaaatccggcgatattcgcgtgctggtggcgacggatattgcggcgcgtggtctggatattgaagagctgccgcacgtggtcaactatgaactgccgaacgtgccggaagattatgtacaccgtattggccgtaccggtcgcgcggcggcaactggcgaggcgctgtcgctggtctgtgttgacgagcataaactgttgcgtgatatcgaaaaattgctgaaaaaagagatcccacgcattacgacgccgggctatgagccggacccgtcgattaaagcggagccgattcagaacggtcgtcagcagcgcggcggcggcggcggtcgtggacgcggacaaaatcaggggggagcggggcgcagtcagcagccgcgacgtcaggatagtggggcggcgaaggcgaaaccaaaaccgcgcacaggcgaggggaaaaccgctggcgacaaagcacgtccgccgcgtcgcccgcgcagaatcacgcctgcccagtaaattttatccggcaacatgcccggtagcgcgacgcttaccgggcctacggactatgcaaatacgtaggccggataaggtgcttgcaccgccatccggcaaaatacacatcgcgttgcgagccgccttccagaaccggtaaaaaaggtacttcccgcccctgaaatgtgacacaatagtggctgtttatacagtacttcaggttttctcatggcattgaccgctgcgctgaaagcgcaaatcgccgcctggtataaggcgcttcaggaccagattcccgactttattccccgtgcgccgcagcggcagatgattgctgacgtcgccagaacgctggccggggaagaagggagacatctggctattgaagcgccgaccggcgtcgggaaaaccctctcctatcttattcccggtatcgccattgcccgggaagagcaaaaaacactggtggtcagtaccgctaacgtggcgttacaggatcagatctttagcaaggatttgccgctgctacgaaaaatcatccccgatctgcgctttaccgccgcctttggccgcgggcgttacgtgtgtccgcgaaacctggcggcgctcgccagtagcgagcctacgcagcaggatctgctcgcctttcttgatgatgaactgacgcctaacaaccaggaagagcaaaagcgctgcgccaggctgaaaggggatcttgacggttacaaatgggatggtctgcgggatcataccgacattgctattgacgacgatctgtggcggcgattaagtaccgataaagccagttgtctgaaccgcaactgtcactattaccgcgagtgtccattctttgtcgcccgacgtgaaatacaggaagcggaagtcgtggtggcgaatcacgcgctggtaatggcggcgatggaaagtgaagccgtactgccggaaccaaagcatctgctgttggtactggatgaaggtcatcatctgcccgatgtcgcgcgcgatgcgctggagatgagcgcggaaattaccgcctcctggtatcgcttgcaactggacctgttcagcaaactggtggcgacctgcatggagcaatttcgccctaaaaccacgccgccgttagcgaaccctgagcgacttaacgcccattgcgaggaggtatacgaactgatcgcctcgctcaatgccattcttaatctgtatatgcccgcagcgcaggaggcggagcaccgttttgcaatgggcgagttgcctgatgaggtcatggaaatctgccagcgactggcgaagctgaccgagacgctgcgtgggctggcggaatcctttctcaacgatctcagcgaaaaaaccgggtcgcacgatattgtgcgtttgcatcgggtgattttacagatgaaccgggcgctgggaatgttcgaggcgcaaagtaaattatggcggctggcttcgatggcgcagtcttcaggcgcgccggtgtccaaatgggcgacgcgtgaaatacgcgaagggcaactccacgtctggttccattgtgtcggtatccgcgtcagcgatcagctggaaagattgttatggcgcagcgtaccgcacattattgtcacctcggcgacactgcgctcgctcaatagcttttcgcgcctgcaggaaatgagcggcttaaaagaaaaagccggcgaccgctttgtggcgctggattcgccgtttaatcatgtggaacaggggaaactggtgattcctcaaatgcgctacgaacccaccattgataacgaagagcagcatattgccgaaatggcggcctattttcgtgagcaactggagagcaaaaaacatcatggtatgctggtactgttcgccagcgggcgggcgatgcagcgttttctggagcatgtcgctgatgtgcgcttactcctcctggtccagggcgaccagccgcgttaccggctggtagagctgcaccgtaaacgggtggagagcggcgaacgcagcgtgctggttgggcttcagtcttttgccgaagggctggatcttaaaggcgagctgctgacgcaggtccatatccataaaattgccttcccgccgatcgacagcccggtcgtgatcaccgaaggcgaatggctaaaaagtctgaatcgttatccgtttgaggtacaaagtttaccaagcgcgtcttttaatttaattcagcaggtagggcgattgatccgtagccacgcctgtcggggagaagtggtcatttatgataagcgtttgttgaccaaaaactacggacagcgtttactgaatgccttacctgtttttccgatagagcagcctgccgtgccagacgttatagtaaaaccaaaagcaaaacctgcacgccgccgacggcgttaatgctgtgagcacacttcaaggagctttcaatggattatcgcaagatcatcaaagagatcgggcgaggtaaaaatcacgcccgcgatctggatctggataccgcgcgcggtttgtatacccgaatgctgaatggcgacgtccccgacctggaaatgggcagtatattgatggcgctgcgtattaaaggcgaaggcgaagccgaaatgctgggcttttatgaggccatgcagaatcataccatcaaactgacaccgcccgcagataggccgttgccggtcgttattcccagctataacggcgcgcgtaaacaggcgaatttaacgccgttgctggctatcctgctgcataaattgggcttcccagtcgtagtacacggcgtcagtgaagatccgacccgcgtactgacggaaactatatttgagctgatggggattatccccaccctacacggtggacaagcgcaggccaaactggacgggcgccagccggtgtttatcccggtgagcgcgctctgcccgccgctggaaaaacagctggcgatgcgctggcggatgggcgtgcgtaacagcgcgcattcactggccaagctggcgacgccatttgctgaggatgccgcgctgcgtttatcaagcgtttctcatcctgaatatgttccgcgtgtggcgaccttttttagccgcattggcgggcgggctttgctgatgcatggtaccgaaggcgaagtctatgccaacccgcaacgctgtccgcaaatcagcctgattgatagccgcggcgtgcaggtactgcatgagcgccagagcgacacgtacgacgagccgctttcactgcctgcgactaaagatcctgaaatcaccgcgcgctggattgagcgctgccttgccggccacgagccggtgccgcaatcattaaaaacgcaaatggcctgttgtctggttgcgacgggagaggcggcgacgttagaagacgggcttgcgcgcgtcgaacaggcttttagcgaataaaaaaagcccgtccagtgacggacgggcaaataagggtaacaaacagggttaatgagggttggagcagtgggtctgttggcaaacagacgagggtaatacccgtcagaattcaaacaacagcgatgttacagcctgaaatctggcgggcaggtaaattatttataaatcaccgcagtgccgctcattttgtcattacctacggcggaggtgatgttataagcgcttgcgccagcagcggcggctttttcagccagtttagcttccaggccatccagcgtggtggcgccatcggcagacactacgccgattttatgcaggttttgcgtctgagacgcgctaaccggttctgcggcaaaagcgccaaaagaaagggtggaaagcgcgatggctgcaacagcatatttaatggttttcatgattaatctctcgcaggttattctgtttatgggacgatgttccgtcgatgtgatgagtatcacggttttttgcgaaagataaaatcgaatagaattgactgccttgctcaaaatttttgaatgacaaataacctattgattattaattaattcaacggttgaatttacctttcttgtcatctggctttacagagtcgaggttaacggcacattctgcgacgcagaacgctaaaaagcatgagcgtaaaggaatggataatactggcggtttcggtaaagaaaagtcagcgtaactggctgtcttttgaacctctacgattatatcctgaaaatgttgcgttatgtaaatctttctcctgttggcaggctatgcataaccgaacgcccggcacggctttacgccgcgcttcagggataggatcgccgcaagattcgcattcatcgcgactttcgccgtggggaagttcgccgcgagcgcgggcaacggcatcttcaatggtattgttgatttgttcattcactgcgtcgtcatttgcccagccggatgccatcacgctctcctgattttagggtacctgaggttaagtgtagcgccgtcaggcgaaaaaatcgcatcgcgcggccttttcagaccatgagcagagccaatgtcattcagagagccgatcaaacgagcgaggcagggaattcgcggtggtatatttaccccgtggcgttatacgggtatcttacgccgctgctaaaaggagaatgccatgtccgcccagaaaccggggttacacccgcgcaaccgccatcaacaccgttatgatctcgccgcactgtgtcagaccacgccggaattgacgtcctttcttatccgcacgcccgccggtgaacagagcgttgattttgctaatccgcaagcggtaaaagcgctcaataaggcattgctggcgcatttttatgccgtcacacactgggacattccgccagggtttttatgtccgccggtgcctggtcgtgcggattatatccatcatctggcggatctgcttggcgaaacgacagggagtattccggcgcaggcaactattctggacgtgggcgtgggcgccaattgtatttatccgcttatcggcgtccatgaatatggctggcgatttaccggtagtgaagtcagcgacgcagcgatgtccagcgcgcaggctatcattcaggctaatacggggttaagccgcgccattcgtctgcgtcggcaaaaagatccggcggccatttttaccggtatcattcataaaaatgaattttatgacgcaacgctttgtaacccgccttttcacgactccgccgccgcagcccgcgcgggcagcgagcgtaagcgccgcaatttggggcagaataaagatgatgcgctgaactttggcggtcaacagcaggagctatggtgcgaaggcggcgaagtcgcctttattaaaaaaatgattgctgaaagccaatccttccgccgtcaggtgttgtggtttacgacgttggtgtcgcgcggcgagaatttaccgccgctttaccgggcgttgacggaggctggcgcggtgaaagtggtgaaaaaagagatggcccaggggcaaaagcaaagccgctttattgcctggacctttatggatgacgaccagcgtcgccgttttatcacccgtaaacgctaaatcgtcggttcgcgcggcggcagcgaatcaggcgacgggccgccgacgggggcgggcagaacctgatacgtttgcaccggcgcgcgcacattagccagatcaaaatgctttttcacctggctatcaagggcaaaacgcaccgtccactgcttgagcggtagcgtggtgaacgacacgcgtaaagtaaacgccgtgttcgttaaactgacaataccggcgaacgtgggttcgccgataatcagcccgcgaatatcctccgtctccatcagcgccgttaccgcgtctttcagcgcctgattcgctttatccgcatcctcatggcgatccacgtcatagttggcgacaacagagccgataccgcgcacaaagttggcgaaagtggtgatcgaggaccacgggataatatggtatgccccggtatcctgccgcacgccgacggaacgaatcgacattctttcgaccgtccccgtcagcgggcctatggtgactaagtcgccggtattcatcccgttttcaaactgaataaagacgccggtgataatatctttcaccagggtttgcgaaccgaaagagatagccagacctaacgcgcccgcgccagccagcaatggcgcgatattgacgccgatttccgataacacgatcatgatggttatggtactgataatcactgccagcgcattgcggaacagcgtcagcagcgtgcgcgtgcgggcgctgggtagcgggcggccatgaatatcggaggccagacgattctcaatcagactggcgaggatcgtccatcccacggcggagaagaataagattaacgcgatacggataaggatatcgaccatcttttcccccgcgccataatgtagccagtgccagaaatcgaatagcccccaggcgttgagcaacagcataacggcgacgcagacggtcaaaaagcgtgcgacttttagcgccgaggagagccagccgttaagccgcttttgtaattccgggtaattgcgctgcgtatggggcgacagggtgatggttttcgctatccagcgggtaaacataccggagataaacgccgcgatgccaataatcgccagactgcgcacggtcgcgcccatcataaacttcaggctattgcctgggtcgaataacgagaagaaaaacagcacgataaagtaagcgctggccagccagtgccacaccagcgcaaaggcgcggataaacaggctaaaaaaggctaatgatcgttccgccagacttaataaatgttgcgtaatctccgctttgtttttaaagatcaggtacagcgcccagatggtgatgcagagcatgatcgccacattagccatcgcgccaacctgaacattcacctggttggaaataatcggaacggcaacaattagcccgtagccaatcaaactgctaagggaactcatacggcgattccagtaacgcgctgtcgcatcctgaatcgcgaatgggcgtaattccggtacattagggcaaaaaataagccgcagaatcgctttaaagaactctattagcgcgaaggcattcaggaacaggctttgctgaaaagcgatagttcgacttcccgcatggaaattatcactgagcatctgaccgataaataaggtgagcgccagtagcaggaggtcgataataaacgcgccgacgatcatcgccgggagctgtaaccagttgctgcgttcacggtttttcttgcgtgcccacaggcccatttttcgatataacggcagggcgcaaagccgtatcacgctataaaaaccaaataccgcgacggccagaaataaaaagtgggttaacgcgttggtgaaggtttgcgagttaaacggcttgtgcggcgcatcggtgatgttgcgataaagctgggcgaaacgggtagcgaaagcatcgccgtactgacgggtaacggtggtgacgttctccagtaccgttttctcatctttggccgcaggcggcgcaagcgctggcgctggctcggtcggcggcgtggttgaggcttcgcggagttgcgctatcaattcgttacgtgaagcctcgttctccagtacgtcagccagggccgcataggccgcttttttttgttcaggactgggctctggcgctgcttgctggctggttgatgtccccgtggtcacgccgggtatggcgaccgcatgggcaggtgcgcccagtagacaaaaaaggatgaacagggtccaccgcatgactcctccagtgagaaaagagacgcaaaacactaagtatagatggcgcaggggagggaaaatgaaatgggactattccatgatgcccttcctgccgcagggctggaagggcgatatctcaggagacgtgctgtaaaaattcctgtaaacgtgggcttggcgggttttcgatcaacgcctgcggactgccatcttcggcaatacggcctttatcgataaaaatcagccgtgaggcgactttttcggcaaagccgatttcgtgagtgacaatgaccatggtcatgccttcttccgccagatcctgcatgactttcagcacttcatggcgcagttcagggtccagagcggaggttggctcgtcaaagagcatcattttcggcttcacggccagcgctcgggcaatggcgacgcgctgttgttgaccgccggaaagctcggaggggtagtggtgcgcccgttccgccagtccaactttcgctaacagagctttcgcctgtttttccgcttcttctttctttacgccgcgcacgcgcagaggaccgaacatcacgttttcgagcgcggtcagatgcgggaacagataaaactgttgaaacaccatgccggcttcctggcgaatcagccgttcgtctactttaggatcgttgactttcagaccatcgacaatcagatcgccggaggtgatctcttccagtttattgatacagcgtaataacgtggatttacccgaaccggaagggccgataatcacaaccacttcgccctgacggatgtttaaatcaatgttatgtagcacctgggtggggccaaagtgcttggagacgtttttaaattcaatcacaggattttcatccttctttcaagacgacgcaaaataaagctcagcaccagcgtaatgatcaaatagaagacggccacggcgctccagatttccagggcgcgaaagttaccggcaataatttcctggccctgacgggtcagctcggctacgccgataacaataaacaacgaggtgtctttgatgctaatgatccactgattgcccagcggcggcagcatacggcgcagagcaagcggtaaaataacatggcggatggtttcccggcgagaaaggcccagcgccagacccgcttcgcgaaaacctttgtgaatggatagtactgcgccgcgagtaatttccgcgatataagcgccggagttaatcataattgtcacgaccgctgcgctgaacggatcaatacgcaaatcattaaatgccatcggcagggcaaagtagataaacatgacctggacaacgatgggcgtgccgcgaataatttcaatgaaaaccagggcgatgtggttggcgaaccagccgccaaacgtacgggcaaaacctgccgccagtccaataaccaggccgccagccagaccgaggaccgagatccacagggtcattttagcgccctcaagcaaaagcggaatggcgggccagatggcgctccagtcaaactgcatatgtcgttcctgttaccgtggtgtaaatagtcaaatgctctatccggcgcggaaatggcggaaagtgtcttatccgtcacggaaagagctgtaggcccggtgagcgtcctcactaccgggccacaagccaacatcaggtcgttttatttaggttctgtaccgaaccattttttgtagatttcgttataggtgccattctcacgcagcgttttcagcgcgccgttgactttctcgcgcagttcatcgctgcctttcgggaaggcaactccgtattgctgtgcttccagcgattcgcctaccgccttgaactggccgttgcctgcggttttgataaagtacaggatgttcggcgtatcgtgcagaacggcgtctgcgcggttggtgcctaattccatgtacgcgttatcaatgttcgggaactgacgcaggtctttggttttgatattcgctttcgcgtaatccaccgacccggttccgctcttcacggcaacgactttgccatcgaggtctttaacgcttttaatatcgttattgttggctttcaccatcacgagcagaccgcttttgtaatagccatcggaaaagtcgatcgcttttttacgctcgtccgtaatcgtaatacccgccagcgccagatcgatatttttggtttgtaatgccggaataatgccgctgaaatccatcggtttcagggtgtagtccagcttcagttctttcgcgatagcgtcccacagatcaacatcaaaaccgacgtatttgtcgccctgtttaaattcaaacggaacgaacgccgtatcggttgccacaacgagtttcttatccgcagcgtgcgaagacaccgcaaaagccagggtaagtgcagccagtgaaacttttaatagagacttcatagcatttccttttctatccacggggcgatcccctgcgagaacatgtagcgtaatgaaaaaatcatgccaattatgtaactcattgttttaacagaagcgtgaaacattcctgtgcacaataagtcgggcaaaaccagtatgccgcaccgttttggggcactgatttagtgcatgaataacaaagtagagatacagggtctatttagcgtaaaaatcgttgttaaaacaatctttaattaacgattgtgtgatgtaattattacaaataattcacttttgtcggaggggagtacaagacgtgtgcactatttaagtgcaaaacccctgtgccaggcaggggtatagggatgacttatatacctgtgtacatcaagttgcaggtgcgttcgcttcagtgaccgacggaagtcaggcttctgcggattcgctgcgtttgtaccttcctgcaactcgaagtattcagggtagagatagatttattcgatgttggattcgataaaccacaggaatttatcgaggtcgcgtgatgcggcggtaaagatatcggcagtgtcttcatctttggcttcaccaatagctttgcgaacatcattagcgacaacagcgtagcgatcggccagttcttttaagtgatcctgcacgttatggatgtcgagcggatagcttttcagtggagttttgctgttgataacttgcgtggtgcctaacgccacaccgccaagctgtacggcgcgctcggccatagtatccagatgatcggtcagtgcggtacggaagccatccagcatctcatgaacggcaataaagttagcaccgcgcatgttccagtgggcctgtttcgtgatcagcgacaggtcaatgaactggatcacctgacgattaagcaactcaaccgtcgcttttttatcgctctctgatacatcgttacgggtataaagcagattagacgcttttgtttttaccagtttagcggtactcataatctcatatcctcttgatgtttgtgtcccaggtaattaacgaaaataagtatagcaccggtttttaactttgcttttttgaatttacctatcactttaatagtacagacaagatttaatatttattttgattaaaaatcaattggttagacgagtttgctgtttggtgggtaataattctcattttaatgtaaaaaatgagaaaaaatatgacaaaaaatgacgaagtaatagcgcaataataaaaggtgaataacgaggtgatattctgcatgattatgcacatcatgcagaataagaaactattttacgtcaacttgtttaatttgcggttcgcgtcgaatcgttagggtagaacccattgaggcggcaatgatggcgcacagggccaggatttgtatgcccgtaagcgtttcgcccagaaaaatcatcccggaaacggcggccagcgcgggttccatgctcatcagcgtaccgaaggtgcgggttggcaggcgcgtcagcgcaatcatttccagtgaataaggcagcgccgtagaaagcacagcgaccgctaaccctaagggaagaatcgaccagtgccatagcgcgtcgccagcctgaactgcgccaatcggcacgaaaatgatggcggcaatcagcgagcctaccgccaccgtggccggaccatgttccgcgcctgctcgctggccggtaagaatatagacagcccaacaggcgccagcgccgagcgccaacgcggccccggtaagatcgacgtgagacatatcttgtcctaatggcagcaggaaccagagcccaagcacagccagtacgacccaaataaaatctaccggccgccgggatgaaaacagcgcgaccgccagaggaccggtaaattccagcgcgaccgcaatacccaacggcaccgtctgaatcgacagatagaatagatagttcatcccgcccagcgacagaccataaaacaataaaggcagccgctgctctttggcaaaacgcaaacgccagggtttgaaaaaggcgataaggataagcgttcccaacgccagacgaagcgccgttacgcccggcgcgccgacaagaggaaataacgatttcgccagtgaagcgccactctgaatagaggacatggcaatgagcaaaaccaaaatgggcaaccagactggtagtttacgtgttgaccccggcatcctttctcctgtcaaaaaatgtcagtacgagtaaaggtggcagtgtaatggaaattccccgcggcggttgagggttcgttgaaaaaaaatttccaggattccataaaatgaacttaaattgatggataaatagactgttagtttaggaataatctggatgaatgtatcgcgccgcacgcgcattattggtgcaataagccggaaaagtgatgttaattgaataagatagcgcgatatggaaacgttctgttacatgaaaggcgcccttagacaccgtgaatcgcaaagagtttcccattaatttttgatatatttaaaacttaggacttacttgaagcacatttgaggtggttatgaaaaaaattgcatgtctttcagcactggccgctgttctggctttttccgcaggtactgcagtagctgctacttctaccgttaccggtggttacgctcagagcgacgcgcagggcgtagcgaataaaatgagcggtttcaacctgaagtatcgttacgagcaggacgacaacccgctgggcgtaatcggttccttcacctacaccgaaaaagatcgtactaacggtgcgggcgattacaacaaaggtcagtactacggcatcactgccggcccggcttaccgtctgaacgattgggcaagcatctacggtgtagtcggtgtgggttacggtaaattccagacgaccgattacccaacctacaaacatgacaccagcgattatggcttctcctatggcgctggtctgcaattcaacccgatggaaaatgttgctctggacttctcttacgagcagagccgtattcgtagcgttgacgttggcacctggattgctggcgtaggttaccgcttctaatcacgtcggtgaaaatgaaaaatccgcctttcggggcggattttttttgcctgaaacgtgcattattttagtgaaaaaatatcgctgcccagatggttatagtccactttctgtaatttgaaattggtgatataaacgggcccggctttctgttccgaaataaatcgatagcgatttttgatctctttagcgctaattcctgtccattgcgagaaaaaactcaggaaatcgttcgcggaacggcgagctttaatgatccgatgcgctttactgtcgctggatagcaccataaacggcacctggaagttttgctggaatttgtcgtcatgcgccaggtactgtaccgctttgccgcgctctttaaacgccagcccgtgatcggagaaatagacgagcgaaaaactgtcgccgctatgacgaagctgagtatagagctgacggagcaaatcgtcggtttgcgtcatggtgtataaataacaagacgtctctttcgactggacaaacgtcgcgtattttccctgagtacggtcgcaggcctggggatgcgaccccattaaatgcaacacaatcaactgcggttgcgtgcgttctgtcgccaatacctgcgccgtcatggttaacagcgcttcgtcgcgagtatttttatccgcttcaaaatcgccgtttttcaggaaatgcgcttcatcggcgcgtttggcgatactggcgatggccgtgtcgtattcgccgatttgcccctgattggaaaaccaccatgtctgaaaaccggcgcggttagccagcgtgacgaaattatcctgatactgtggtttgttatccaccacgcgattgagcgttaaaccgagcgatttttgcgttgagccgctggcggcgatgtaatccataaagaagtcgccattcacatggctggcgaagggggtattatcccagtggccgccgaaagcgcccatggcatcccgtcgcgcgctttcaccaatcaccacgacatagatgtgatatctgggtttcaccgcagtaaccgtccagctatcttttatgccggatagctgcgccatacggtgctgctcttcaatgacttcgttgttattgacgataacgtctttggcgaagcgaaaaaccggatagccggtatcaataaccttaaaaacgccgccccacgccagattttgtaccggcgcgacgaaaaatgccgcgacgctaatcagcaggcacaggctgtcgaggctattccagcgcggcctggcctcttcttttcggcggcgaagcgcaataatacccagcgcaaaaataaaaagtccggtcaggtagctataccacgggaagatggtcaggatttcgctcgactcttccatattggtggagtgcagcgccagcagcgtattaaagttcggcgcgccgtaagcctggccaaagggaaaatagcaagcggctaccagcgaacagatgccgagcagcgctttttgtccgcggggcaggtagcgccagagcaacagcaacaggcaggtaaacgccgcggtataaagcaggctaaaggggtagccgagcgcgaggttaatcagcagcgactgtaaaaagtagaggcccgcccacgggcttacagcccgacgacgggccagaagtgaatcgataagggttgaattcatatgccactattgcaaaaacgccatgtgctaaccctggcgcgaagggtcattacctgcctgattatgcgtaaaaaaggtattgggttcgcaacggcgagtcgcaaaatattcagggctgccagaagatagagcgtgcgggtaagaaggtcaaccgccggaaagaaaatgttttgcgaagagaatagcaaaaccacaaaaaaacaggggaaatgggcgccatttccgttgaggatgcaaaataaagcggcgtaccgcaccgccgcgttatttcgtggaagggttatcctgctccggtttgccgttgatcatatcgcacaacatagagagcagcattaaccggactttaaagggagagtgactgaacacgcgtatacacctcttaaattcgttcatataaacctcctgatgtttctatcccatcgatccgtgagggatgtctgcattacatacagatatagcacaggctatgttttatagctattgctaaaacgttaattttttgtgcccagacaactctggtttacaatgagcgctctgtcagctgacgcgttaacgcgtcacagaaacgaggaagcaaaatgggtcgtcgcgcaggtacgccaacaacaaaaaaagtgacgcaattggtgaacgtagaagaacacgttgaaggatttcgtcaggtcagagaggcgcatcgccgtgagttgatagacgactacgttgagctgatttccgatttaattattgaggtaggggaagcgcgtcaggtggatatggcggcgcggctcggcgtctcccagccgactgtggccaaaatgcttaagcgcctggcatcgttaggatttattcaaatgatcccctggcgcggcgtttttctgacgccggaaggggagaagctggcgcaggaaagccgcgagcggcaccaaattgtcgaaaattttttactggtattaggcgtaagtccggagatcgcgcgtcgtgatgcggaagggatggaacaccatgtcagccaggagacattggatgcctttttggccttcacgcaacagcatggaacatctgcagaatgagtctggcctttttacgggcgctgcggcgtgaccgtttttttcagttgttgatcattgtggggatggcgttaagcctgtttgttccttttgcgccccgcgcctggcctggcgcgattgactggcacaccattattaccctcagtgggttaatgttgctcactaaaggcgttgagctgagcggctattttgatgtgctgggacgcaagatgacgcgccgatttcataccgagcggcaactggcgatgttcctggtgctggctgcggcggcgctgtcgacctttctgacaaacgatgtcgcgctgtttatcgttgtgccgctgacgataacgttaaaaaaactgtgcgcgattccggtcaaccgattgattatttttgaagcgttggcggtgaacgccggttcgctgctgacgcctgtcggtaatccgcaaaatattctgttgtggggacgctccggcttaacctttgctgaatttagcgggcaaatggcgccgcttgccgtcatgatgatgctgacgttactgctcctgtgctggttttgttttccgggtagggcgttacagtatcataccggtacgcgttcgccgcagtggcagccccgtctggtgtggagttgcctggcattatatgtcgtttttcttaccgcgctggagctcaggcaagagttatggggactggtgttggtggcggctgggtttattgtgctggcgcgcagggtgatagtcagcgtggactggacgctgctgctggtatttatggcgatgtttattgatgtccatctgctaacgcaattgccggcgttgcagggcgttttcaaccaggttggcgcactgtctcacctggggctttggctaaccgctatcggcctgtcgcagattatcagtaatgtgcccagtaccattctcctgctgaactatgtaccggcctcgacgctgctggcgtgggcggtgaatatcggcgggtttggtctgctgccggggtcgctggcaaatcttattgctttacggatggcgaacgatcgccgaatctggtggcgatttcatttctattcgctgccgatgctggcatgggcggcgctggtgggatatggattattgcaactgatgccgtaagagaagcccgatagtatctatcgggcttcgcaggcagagtctgtcagttcagacgaaccggcatcccggaacgatcctgaactgcctgttgtacgacggtctgatcaacgtcaggctcgttggtgacggccaggatactcttattaagcgtgatcggcaccgcttccttaccttcaaactgcgcttccgtcgttgacagcgggttatgcacctcaatgtaacggctaccgtccggctcggtggtggcttttaccggttcatcgataaactgcacgcgggtaccgaccggcacattttcaaacaggaatttgatatcgtcgttgcgcagacgtacgcagccgtggctcacgcgaagcccgatgccgaagttggcgttggtgccgtgaatagcatacaggcgaccgatgtacagcgcgtacaggcccatcgggttatccgggcccgcaggcacgacggcaggcagcggctcgccggcggcgcgatattcagcgtgcatttttgccgtaggcgtccaggtcggaccggcttttttacgttcaactttggtcgtccagttgataggcgtgtctttacctaactgaccgatcccaatcggcaggacgataacggtgtttgtgcctttcgggtagtaatagaggcgcatttccgcgctattgatgataatgccttcgtgtacggtatccggcaggatcagctgctgcggaatattcagcacggtaccgcccttcggcaggaaggtatccacgccagggttggcttccagcatgttggagagccccatctggtactccgcggcaaaatactccagcggctgggtattgccctccggaacggtgatgacctgattttgcccaattaaacggctaccatcggtaggcagcgggtaagtgactgctgaggctgttttacaaaaaccaactacagcgaaagccgccgcgaaaagcgttgttaatttcatattcatgttatgcgagattctgtgccaagcaggctagtaggttgagaattctgtcatgttgggagcgcattataggtgcattccagtaaacagggaattcagatgtgtacgaaatcacgtttttttcccttacggttcagtgtagccctttgtacagggcgcgatcttatttcagacttgtggcataataagcggtttgtcacatcttttttcaggataagcttgtgttagtttccagcaacgttaccatgcagttcggcagtaagccgctgttcgaaaacatttccgtcaaatttggcggcggcaaccgttacggcctgatcggcgccaacggtagcggaaagtccacttttatgaaaatcctcggcggcgacctggagccgacgctgggcaatgtttccctcgatccgaatgagcgcatcggtaagctgcgtcaggaccagttcgcttttgaaacattcaccgtacttgatactgtcattatggggcatggcgaactgtgggaagtcaagcaggagcgcgaccgtatctacgccttgccggaaatgagcgaagaagacggctataaagtcgccgatctggaagtaaaatacggcgagatggacggttattccgctgaggcgcgcgcgggcgaactgctgttgggggtgggcatcccgctggagcagcattacggtctgatgagtgaagtcgcgccaggctggaaattacgtgtgctgctggcgcaggcgttattctctaatccggacatcctgttgctcgacgaaccgaccaacaacctggatattgatactatccgttggctggagcaggtgctgaacgagcgcgacagcacgatgatcatcatttcgcacgaccgtcacttcctgaacatggtttgtacgcatatggcggatctggattatggcgacttgcgcgtctatccgggtaactatgatgagtatatgacggcggcgacccaggcgcgtgaacgtctgttggccgataatgcgaagaaaaaagcgcaaattgccgagctgcaatcttttgttagccgttttagcgccaatgcctctaaatcgcgtcaggcaacgtcgcgcgcgcggcagattgataaaatcaagctggaagaggtgaaagcctccagccgtcagaacccgttcatccgttttgagcaggataaaaaactgttccgtaacgctctggaagtggaggcgctgacgaaaggttttgataacggtccgctgtttaaaaatgtcaatttgctgctcgaagtcggcgagaagctggcggtactcggcaccaatggcgtgggtaaatctacgctgctgaagacgctggttggcgatctggacgccgatcacggcaccgttaaatggtcggaaaacgcgcgtattggttactacgcgcaggaccacgaatatgaattcgaaaatgacctgacggtgtttgaatggatgagtcagtggaaacaggaaggcgacgacgagcaggcagtgcgcagtattctgggccgcctgctatttagccaggatgatatcaaaaagcctgccaaagtcctctccggtggcgagaagggccgtatgctgttcggcaaactgatgatgcaaaagccgaatatcctgatcatggacgaaccgactaaccacctggatatggagtcgatcgaatcgctgaatatggcgctggaactgtatcagggcacgctgatctttgtttcgcacgaccgtgagttcgtcagctcgctggcaacccgcgtcattgaaattacgccggagcgcgtggtggacttcagcggcaactacgacgattatttgcgtagtaaagggatcgagtaagttattgtctgtaaccccgatagcgtcggggttacagaatgttaacaaggtaatttttattttttccgaatgcaatgtgaaaattatatatactcttagagcctatcccattagggctattttacttgccattttggacctgggcagtgctcgccaaaacgcgttagcgttttgaacgccgctagcggcggcccgaagggcgagcgtagcgagtcaaacctcacgtactacgtgtacgctccggtttttgcgcgctgtccgtgtccaaactggctgcgccaataacgcctggtgggataggctcttaatattctattttaaaattaaatgaaagaagaggatctatcataaaaattgcgaatatattttgtggtaaacatattgtaatgttattttctttataagaattcaagtgctattttatattcctttattgttcaacaaaaggaataaatatgagcattttggaacgcttttttggccgtaaagaaaaaaactcatctaatatacaaggtgttttagtagcgaatgctgaagttgataacccactaagtttagttgttgtatttgatactctcccggaaaataattcaaaagaactcacccgcttgttgcgtaattatcattccagtatgaaacaggcaacgtgtgaacttgtccctgaactggatttttttggtttagcaggatggggtaagcatgtaatatcgatggttggatttaaaacgccttaccctcaggaatcaatcgaacaatgcgtcgcgccagctcattatccccaggaagtaaaagagcaagtacgggcaaccagtgcaaatattattttatattataaggggtatgatacttcacctttagagcaatatgttgcgttggctgtggttgcaggtgcattaagtaacatgggggctgtcgctgtattaaatgaatcggctcacacttcattacctgcgggggtatttaagtctcaggagttgggtaagcatagtctggaaatgttgcgtgaaggtttcccgctgacctctctattttgtggatttgtgaaatatgaagttgaggatatcgaaggcgtatggatgcgtacctatggtgctgattgctttgggctaccagatttcgcagcacacgcacaaggtcatcacgaagggcaaaaatattctgatattttcaataatgttctgcgttacctgcttgaaagtggagcagaaatggctgccgggcataccatgcaagtcggtaaaacgacatttatgaaactgcgcgatccccttgacgatgaatattacttacaggggcctggaaccacattagtggttgaactgattgaagaagatgagtgtaatgctcattgagaaatcggggtaattgccccgactctcgttaaagtgtaaacggcactttattttccagcaccgcctgaatcacattcagtgcgccttcatgcttattattatcggtagcgtaacgggcgatttgtttaattttttctgcggcattgtccatcgcaaaggaataatgcgccatttttagcatctctgcgtcattgccgctgtcgccaatcgctaccatattttgtggcggcagatcccagcgtttcagtaaccgcgaaataccgtttgctttatgcaggccgggaataatcagatcgataaaaccgaagccgctggtgacgggcttcataatgccatcgagcgtaacgtgtagtttgtcgatcactaacgggatttgttcatccggtaggttgagcgaaaacttgaacagtacgtcatcaatctcctgataatcttttacgggtttcaggcgatggtagtgttttgccatcagggtaacgaatgcttctggcgcattttcgctgacatatgcactttgcagaccgcaggcgacaaaattaagttgcttatctttcagcaactcgccaataataatccgcgattcatgtcgggtcagttcgccgtggaacagttgcttgccatgttcgtaaaccagtgcgccgttttccgcgacaaaagagatcgcatcctttagctcaggaaagaacgaaataagctggtaatactgattaccgctggcgacaacgaactcaatgccgcgctttttcagttcctgaaattacgccggagcgcgtggtggacttcagcggcaactacgacgattatttgcgtagtaaagggattgaaagctaaacactgacgcccggtggcgttgtgtttaccgggcctacgtatcctggcgcgtaggtccggtaagacgggtgcgcccagacaaagggcgcaccgcagttaagcgggcagggcggtacgaccgtcaaacatctatacctaatgcccgtttaccgtgaatattcagatcgcgcagcgtgaagcgcccttcccaggtggtttcatagtcctcgcgcgggaaatcgcccggtgatgcgcctgtctccagcgccgctttcaccttacgcgcataggccagatttttctcacacattggcgcggcaggaatgtacatcacattgccccagccctgctgattttcgacgggggcgacggagtggatgacatcgcaatgccaccacacggaatccccggcttccagcggcggaatgctggttaacgccgccatcagtaaaggatgccactgttcagaaatcggcagcacccggcccggcgcgacgccgcataattcatcttccgggacatcatccagcagcgggcgcagcagaatatacgccatcgcctccgggatagggacgacatgaagcaacccctgaccgggcagcatatcggagagcgcggtccagccctggaaggtgcgaaataccgagcattttgtggtgttatccaccgtgtactcttcaacgtcggtacggtgcgccgcattccacggatcgtactgctcgacgttgccgttaaacacgctggcgaatacctgctgataggctggcagcagccagcgttccagcgcgccggagtcggtatgcgcccccagtcctttggatgtggtgcccggcgggcggcggcggatgcgatccgggtaaataatgctgatatccggattaaaccatcgcttgccgtcgtgctctacctgccatagacggttgaggaacgactgcgccagcgccatctcttcactttggcgggcctgcatttgcgcctgcgaccagtagacaggatagatttcaggccgggaggcgctcagcgtaccgaaaaaattatcccccggtcctttatacacctcgtcaaaatggttcttgtccagataatcgagcatcgactggtcccatgccagcgcctgttcgcgtggaaaatgacctttaatcaccgcgcacccgcggcgcttaacctcggcgcgggtggcatcgctaatgttgcccatcgccagttcgctaaaagggataattggccataccggctgcccctgcgccttcagatcgttaatttccgccacccgggctgctatggtggcgctcaaacggtcgaacaccgcctgtacgtcgccgatttgcgcgcgtagcgcctgcttcatctgacgaatggccgcttttgggtcggcgggcagcgtttcgtgggtaaaaggagtcgtcatatcaacctcatcatctttcgttcgaaagtaaaattagttacatctgatactttaagttaaaataaggttaatgcaagtttaaaatattgcaggagcgcacaaggagagaagcgagaggaaaacgtaaggtggccaggacgccttaatgtcttatgcggctattcctttcgttcagccacttttcattcgaaataaatttgtggttctgctcacattgttattaaaatgtttctggtcgcagttacagccaggagcttaagtatgaccgttaacgttgtcgttacagatatggacggcacttttctcgacgatgccaagcagtacgatcgtgtacgcttcatggcgcaataccaggaactgaaaaaacgtaatatcgaatttgtggtcgccagcggtaatcagtactatcagttgatctccttcttccccgagctgaaagacgaaatttcctttgtcgcagaaaatggcgcgctggtgtatgaacatggcaagcagttgtttcacggggagctaacccggcatgaatcgcggattgtgattggcgaactgctgaaggataagcagcttaacttcgtcgcctgcggtctgaaaagcgcttatgtcagcaaaaacgctcccgagactttcgtggcgctgatggccaaacattatcaccgcctgcagccggtaaacgattatcacgacattgacgatatcctgtttaagttctccctgaatttgcccgatgaacaaattccgctggttatcgacaaactgcacgtatctctggatggcatcatgaagcccgtcaccagcggcttcggttttatcgacctgattatcccgggactgcataaagcgaatggcatcagtcgtctgttaaagcgctggaacaggtcgccacagaatgtcgtcgccattggcgacagcggtaatgatgcggaaatgttgaaaatggcgcattactcttttgccatgggcaatgccgcagacaatatcaaagcgctttcacgttatcacactgatgataataaccatcaaggcgcgctcaacgtcattcaggccgtgcttgacggcaccgatcccttctgattaacaggcctgcgtaggcctgttaaacgtagcgccatcaggcagttcggacatattgccgatggcgccagggtaaattacagcatatgttcggtacgggcgatgatatcgtcctgcgcatccggcgacagcgcggtgaagaaggcggagtagcctgccacacgcacgaccagatcgcggtactggtctggatgttttttcgcatccaacagcgtttcgcgtgacacgatgttgtactgaatatgccagcctttatgcacctcaaagaacgtccgtagcagaaccatcagtttctgtttgtcggattcgttttccagcgtcgttgggttcagtttctggttgagcagcacgccgccgagaatggaaccggtaggtaatttgcctacggaaccaatcaccgccgtcgggccgagatgatccgtacctgatgcagggcttgcgccttccgccagcggtgtatgcgctttgcgaccatccggggtagccatagtcgcggcgccaaatggcacgtttgctgagatagaggacgtaccggcgtaatagttgccgccgacagggccacgaccgtagcgcgggttatgatattgcttcagctcatcaatataggtctgataagcgcgcgccagcagcgtatcgacggtatcatcgtcgttaccgtacttcggcgcgccgttaatcagacgctggcgcagctgctcatgggtcagcccgtcaaagtcatcggccagcgcggcggcaagctgctgttgaccgataacgccctgttcgaagaccagttttttcacagcggcgaggctgttgcccaggttggcgataccgacctggagaccggatacccagtcatatttcgcgccgccttgcttgatacttttcgctcgctcaatacagtcatctaccagcgctgagcagaggatatcgtggacgttctcttccaacatggtgtcgaccacatactcaatttcaatcgatttgcgcgtgtagtagcgaatttgggtatcccaggcggccatcacttcgtcaaaattgttaaagttgcctgcggagagcgccttttcctgcggcagaaataccttgccgctggtggcgtcgcgaccgccttccagcgccgccagcatgacgcgggcgaagttaataaagctcatgccggtgcagcgataaccccatttcccgccgacggcggtttcgatacagccgatcgccgcataatcgtaagcgtcctgcggttcgatccccaacttgataaattccgggatgacgatttcatcattgttaaacgccggcatcccaaagccgcagcggatgacctggacgcaggcgtcaaggaaatcgttactcattccggcgtgataacgcacactgaggttgggctgggtagaacgcagacgtccacaggactccagaatggcgtaagacagcggattcactgcatccattggctgaccgttgataagtttctgaccgccaatggtgacgttttgatacagcgggctgcccgcggaggctttagagtgcgaaccggagcggatcttgtttacttccagcagtttcagccagcagctgtgcagcagttcaatggcgtgctcacgatccagcgtctggtttagttcgacatcgcgacgataataggggtaaagatactggtccatacgaccaaatgacaccgagtgaccgttagactcaatttgtagaatcagttggatgaagtagcacaattgcagtgcttgccagaaggtctgcggcggttggtgggcgatcacctcgcagttttcggcgatggtaagtagctctttacgacggctttcacgggactcttcgcccgccatctggcgcgccagcgcggcaaagcgcgtgatatgctggcttaccgcgtccagcacaatatcaatcgccttcaggaactgctcgccatgcagatcttccagcacggtcaggttgatgcgtgagcggcgctcggcgactttatcgcgcaggccataaagccctttttccagcagcagcgggaagttcaccgccaggtgcgcatcgccggaagtcatattgccttcggctttgataatgccagtcgccagaagccctttttgttcatcggtaaacatgccgtagcagcgatcctggacggtttgaccgcgccaccacggacagacgtcgtgcagaatacgtttgttttcttcacttacggaaaaacctgcgccgggccggtccgccaggtcgtcgatctctttttcaatccacgagacggtatattccgggaaaatcggcgcggcgcggacttcacttgcctggttgccgacgatcagttcatcgtgttttatccagatagtgcgttccgccaggtgatgggccagcgccagcgcacggcgtaccggaatcggtttatccagatgctgctggtacatttcggtataatgctgcgcgcgctcggtacagaccggcggtttcacgatatgtaccagcgcggttttgtgcgccttaatgcggtcactgagcgtgtccagtttcagttgggtcatgataattatcctcgtagggtcgcggttaaacctttttggcaggcgtacttctgggcaaaatcaagtaacgccggcgcatccagtggtttatccggggcatgatagggttgactgagtaagtggtatttattgatgcccagcgtgtggtagggcagaaaatgaatttccccgacgtgcagttcgtcggcggcaaagtcggtaatggctttaatggcctcctcatcggcattaaatccctgaatcagcgggacgcgaatcaccatttttttgcccgcggcggcgagtttcctgagattttccagcacccgcgaggcgctgccatcggtccactgcttaaacggcccgtcggcgacatgcttcaaatcagccagaaacagatcgatataaggcagtgagggcgcaatgtatttccatgggacatgcagacaggtctcaaccgcagtatgaataccggcgtcatggctggctttaaacagctctgccgccagttccggctgcataaacggttcgccgccggaaagcgtaagaccgccgccgctgcgatcgtaaaaaggtttatcgcgcagtaccgtcgccatgatctcatccacgctttttatttcgccgcacacggttaacgcctgtgtggggcagcaatgcgccaggatggaaaaatgggcgtcggtcagtttctcgcgatggatgagcaggccgtttagcgcgcgctcaatgacgtccggcgcggcttgcgcgcacaggtcgcatccttcgagacacagccgcgcgtcgtataacagatcctgagcgcgggcgcggctttccgggttctggcaccagcgacagcccaacgaacagcctttgagaaatactacggtacggataccggggccatcgtgggtagaatagcgctgaatattgaagatcataaacggcctctcttatttcatataaagattaaattactttcgaatgaaagctatcttgatgtgcgtcaacgaatggagaggttctgacaaagaggcgttaaatgaggtacaacatcacggtttgaggttgtggtatggcgtttaagatgatgccgcgctgcttgagccgatcgtcagtcggagcttgggtaagctggctttgcgtctgatgacagtaattatctgttgatacagcacggccataaaccgtgctttggtatgtttatccgtaaagtggctactgcccgcagacctcacagccggggttgcgcattaacttcatttcgcggaactgacaggtcatcgcatcgtacatgacgatttttccgctggcaggctgaccgtaatgcgccagtagcttaatggcctccattgcctgtagcgaaccgatcacgccaatcagcggcgccatcacccctgcctctacgcaggtcagagcgttttcgccaaacagacggctcaggcagcggtaacagggttcgttttcccgatacgtaaagacggtaacttgtccttccatacgaatggccgcgccggagattagcggcactttcgcggtatagcacccggcgttaagttgattacgtacgctaacgttatcggtacagtccagcaccagcgaatgcccggcaatcaggctggtcatagcgtcgtcgtccagccgcgcgttaacgggcgtaatggtaatatgtgggttgatacgcgccagcgcgtcgcgggcggactctaccttcggctgcccgaccgtggcgtcgctgtgcaaggtttgacgctggagattggaaacggaaacggtatcaaaatcgagtagcgtcagttgcccgacgccagcgccagccagatactgcgttgccgcgcagccgagcccgcccagcccgaccactaatacccgcgcatcttttaacgcttcctgcccttcaaaatcgaagccgcgcagaataatttgtcggttatagcgcagcatctcctggtcgctaagttccgccattacaggcctccgaacagagcattaaacggctcgacttccacccattctcccggctcaacattgccgcgttcacgctccagcacaataaagcagttgcccagactaaacgagctgaaaatatgtgaaccctggtgtccggtggtcgtgacctccagttcgccgttggcgctacgttgcagaatgccgcgctggaaatcgagacgccccggcgttttcttcaggcgagatgctgtgcgtacacgctggcgcggcggcactgcgcttgccgtgttgccgccaagcttcgccagtaagggctgaaccagttgataaaacgtgagcgccgcagagactggattccccggcaggccacagaaccagctattactgagcttgccgaaggcaaacggtttgcctggcttgatagccagcttccagaaggcgatttcgcccagctcctcaaggatggttttggtatagtccgcttcaccaaccgagacgccgccggagcttatcactacatcggcctggctgtcggcgtcgataaacgcggcgcgaagcttaccgggatcgtcaggaataatgcctaaattgatcacttcgcagccaagctgttgcagcatcaaatgtatagttagacggttagtgtcataaatttgtcccgcctccagcggctggcccggaagctggagctcgtcgccggtcgagaacagcgctacgcgcactttacgtacaacctgcgcatcggcaattcccagcgacgccagcactggcagttcggcagtagtcaggcgcgtaccggccggaaagaccaccgcatcctggcgaatatcctcgccgcggcggcggatgttttgtccgcaacgaacatcggcggtaaaacgcacgccgtcatcggtttgttccgtctgctcttgcatgactaccgcctcgcaacctgccggtaccggggcgccggtcataatgcgaatgcaggttcccgcaggccactctccctggtagggctgaccggcaaatgctttgccggcgacgggcagcggcttatcggcggacaaatccgccacacgtaccgcataaccatccatagctgaattatcaaagccggggacatcaaggggagatacgatatcggtcgccaggatgcggccaaagcagttcaccagcggcaacgtttctacggcggtgagaggggtaatacgtgaaagcatctgggtcagcgccgtttcaagcggcatcaatccggcggaaaattccatgaacatactcctgcgaggcaaaatcgaatccggctattatgtcagaaaacagtggcgggcagtatgctacctcggtcttagagacggccttgcgcctttacataccttacgcatctttctatattcaaaaatcgaatgaataactcacaacaattctgatagttatagtaaaagttgtgtgccaccgtaatggaccctaaaaatgaataaagcagtgattgcgattcacggcggcgcaggcgcgattgctcgcgcgcaaatgagccatgagcaggagctacgctatatccaggcgttgtcagagattgttgaaagcgggcaaaagatgctggaagcgggtgacagcgcgcttgatgtagtgacggaagcggtgcgcctgctggaagcgtgtccgctcttcaatgcgggtatcggcgcggtctatacccgagacgggactcatgaactggatgcctgcgtgatggacggcaataccctgaaagccggagccgtcgcgggcgtgagtcatgttcgccatcctgtgctcgctgccaggctggtgatggagcgcagcccgcatgtactcatggtgggggaaggggcggaaaactttgccttttcacaggggatggcgcgcgtttcgccggatatcttttccaccccggcgcgttacgagcaattgctggcggcgcgtgcggcgggtgaaatggcgctcgatcacagcggcgcgccgctggacgaaacgaaaaaaatgggtacagtcggcgcggtggcgcgggataaattcggcaatctggcggcggcaacgtctaccggcgggatgaccaataaattgcccgggcgcgtcggcgacagcccgctggtcggcgccgggtgttatgccaacaacgccagcgtcgccgtttcctgtaccggaacgggagaggtctttattcgcacgctcgcggcttacgatatcgccgcattgatggaatatggcggactcagccttgccgacgcctgtgagcgcgtggtgatggaaaaattaccggcgctgggcggcagcggtggattaatcgccgttgatcacgaaggtaatgtcgcgttgccgtttaacagcgaagggatgtatcgcgcctggggatatgccggggatacgccgaccacaggaatttaccgggaataaggagccgcaggtgccgcacagcgatgaactggatagccgcgatgttctgtccgtcagtggcctgaatatcgcgtttcaccacgaagggcaacaggtagacgccgtgcgtaatgtgtcattacgcctgaagcgtggagagactctggcgattgtcggcgagtcgggatcgggaaaatcggtgacggcgctggcgttaatgcggctgattgagcagtcgggcgcgaacgtgcgctgcggcgaaatgctgttgcgtcggcgtaatcgtcaggtgattgagctgtctgagcagagtgacgcgcagatgcggcgtgtgcgcggcgcggatatcgccatgattttccaggagccaatgacctcgctcaacccggtatttaccgttggcgagcaaattgccgaatctattcgtttgcatcagggggccagccacgaagaggcgctggcggaagcgaaacgtatgctcgatcaggtacggatcccggagtcgcaggcgattttatcgcgttatccgcatcagctttccggcgggatgcgccagcgagtcatgatcgcgatggcgctatcctgccgtccggcggtattgattgccgatgaacccaccacggcgctggatgtcactatccaggcgcaaattctgcaacttatcaaagtgttgcagcaagagatgtcgatgggcgtgatttttatcacccacgacatgggcgtcgtggcggatatcgccgatcgcgtgctggtgatgtatcagggcgaggccgtggaaaccggcagcgtagagcagattttccatgcgccgacgcatccttatacccaaacgttactggccgccgtccctcagcttggcgcgatgcgaggccactcgctgccacgccgtttcccgttgatttccgctgacgaaccggccctttatgaatcgcagattgagcaagacacggtggtggaaggcgaacctattctccaggttcgggggctggtgacgcgattcccgctgcgtagcggtctctttaaccgcgttacgcgtgaagttcatgccgttgagaatatcagtttcgatctctggcccggcgaaacgttatcgctggtgggcgagtccggtagcggaaaatcgacgaccggacgcgcgctgctgcggttggttgaatcccggcagggggagattatctttaacggccagcgcattgacacgctgtctgcgggtaaactccagccgttgcgccgcgatattcagtgtattttccaggacccttacgcctcgctcgacccgcgccagaccgtggggtattccattatggaacctttacggattcatggcctggggcagggggacgctgcggcaaagcgcgtggcctggttgcttgagcgtgtcggattacgtcctgaacatgcctggcgttatccgcacgagttttccggcggtcaacgtcagcgcatctgcatagctcgcgcgctggcattgaatcctaaagtgattattgccgatgaggcggtctccgcgctggatgtttccgttcgcgggcagatcattaatttactgctcgatttacaacgggaaatggggatcgcctacctgtttatttcgcatgatatggcggtcgtggagcgaattagccatcgcgtggcggtgatgtatcttggtcaaattgttgagatggggccgcggcgcgccgtttttgaaaatccgcagcatccttatacgcgtaaattgatggcggcggtgccggttgccgatccctccagacaccggccgcggcgcgttctgctatcagatgatatacccagcaatattcataaacgtggcgaagagacgcccgccgtttcattacagttggtcgggccgggacattatgttgcgcggccgctgcaggataatgcgctctcgcgcttataacattcagacaggcagggtttcaggagaacaacatgacgcaatttattacgcataaatggctggcggcgctgggactggcctcatccattgcggcttttccggccctggcggccaaagatgtggtggtggcggtagggtctaatttcaccacgctcgatccgtatgacgccaacgatacactctcgcaggcggtggcgaagtcattttatcaggggctgtttggcctggataaagacatgaaggtaaaaaacgtcctggcggaaggctataccgtttctgatgacggtctgacctacaccattaccctacggcagggggtgaaatttcaggacggcgcggattttaatgcggcggcggtaaaagcgaatctcgatcgcgccagcaatccggataaccacctcaagcgttataacctgtataaaaatatcgcaaaaacggaggttgtcgatccggcaacggtaaaaattaccctgaaacagccgttctccgctttcattaatattctggcgcacccggcgacggcgatgatctcgccgcaagcgctggaaaaatatggcaaggatattggttttcatccggtcggtaccggtccataccagcttgaaacctggaatcagaccgactttgtcaaagtgaaaaagttcgccggttactggcagcagggcttacccaagctggattctattacctggcgtccggttactgacaacaatacccgcgcggcgatgctgcaaaccggcgaagcgcaatttgcttttcctatcccttatgagcaggccgcgttactggcgaaaaataaaaacctcgaactggtcgccagcccgtccattatgcagcgttatatcagtatgaatgtgacgcagaagccgtttgataatcctaaggtgcgtgaggcgttgaattacgctatcaatcgtcaggcgctggttaaagtggcgtttgccggatacgccacgccggcgacgggcgtggtgccgccgtcgatagcctatgcgcaaagctatcagccgtggccctatgatccggctaaagcgcgcgaactgttgaaagaggcggggtatccagacggtttcagtaccacgctgtggtcatcgcacaaccatagcaccgcgcaaaaagtgttgcagtttacccaacagcaactggcgcagattggcgttaaagcccggataaccgcgatggacgccggccagcgcgccgcggaagtcgagggcaaagggcaaaaagagagcggcgtgcgaatgttctatacaggctggtcggcgtcgacgggcgaagctgactgggcgttatcgccgctcttcgcatcacaaaactggccgccgacgcagtttaataccgctttttacagcaacaagcaggtcgacagcgatttggcggcggccttaaagaccaacgatccgcaggagaaaacacgattgtacaaagaggcgcaggatattatctggaaagagtcgccctggataccgttggtggtggagaaattggtttctgcgcacagtaaaaatttgaccggtttctggattatgccggataccggtttcagctttgacgatgcggatttgaagtaagtaatgcgatggggctggatggcgcgcgcgttgtccgccatccggtaaaaggttcgtgtgatgcttaactatgttctcaagcgcctgctgggattaattcctacgctgttgattgtggcagtgctggtgtttttatttgttcatttgttgcccggcgacccggcgcggctgatagccggaccggaagccgacgcgcaggtgatcgcgctggttcgtcagcagctggggcttgatcagccgcttcatgtccagttttggcattacatcacccatgttttacaaggcgatttcgggacgtcaatggtttcccgccgcccggtttctgaggagatcgccagccgctttttgccgacgctgtggctgacgataaccagtatgatatgggcggtgctgtttggcatggcgatcggcatcgccgccgccgtgtggcgtaatcgctggcctgaccggttaggaatgacgcttgccgtgaccggcatttcttttccggcttttgcgctgggaatgttgttaatgcagattttttccgtggatctgggctggctaccgaccgtgggggcggatagctggcaacattatattttaccctccctgacgcttggcgcggcggtggcatccgtcatggcgcgttttacgcgctcctcgtttgtcgatgtcctgagcgaggattacatgaggaccgcgcgggcgaaaggcgtcagtgaaacgtgggtggtgttaaaacatggcctgcgcaatgcaatgatcccggtcgtcaccatgatgggactgcaatttggctttttgcttggcggctcgatcgtcgttgaaaaagtgtttaactggccggggcttgggcgattactggtcgactccgtcgacatgcgcgactaccccgtgattcaggcagaagtgctgctgttttctctggaatttattcttatcaacttagtggtggatgttctctatgccgccattaatccggctatcaggtataagtaaggatgcgattatttaactggcgccgtcaggcgattttacatgctatgccggtggtaaaacccgaccagatacgcacgccgtggcgggagttctggcgtcgttttcgccgccagcatgtcgcgttggtcgccgggggattcgtactggcgttaattctggtggcgatttttgcccgttggctgacgccctacgatgcggaaaactattttgactacgatagcctgaacaatggcccctctttgcagcactggtttggcgttgactcgctgggaagagacatctttagccgggttctcgttggggcgcagatctcactggcggcgggcgtgttcgcggtatttatcggcgcgataatcggtacggtgttgggattgctggcgggatattatgaaggctggtgggatcgttttattatgcgcatttgcgatgtgctgttcgccttccccggcattttgctggcgattgccgttgtggcggtgttaggcagcggtattgctaatgtgatcgttgcggtggcgattttctctattccggcgtttgctcgtctggtgcgcggaaataccctggtcttaaaacagcagacgtttattgagtctgcccgcagtatcggcgccagcgacacgacgattttgtttagccatatattgccgggaacggtctcgtcaattgtggttttctttacgatgcgtatcggtacgtcaattatttccgcggcaagcctgtcatttctcggattaggcgcgcagccgccaacgccggagtggggagcgatgctcaatgaagcgcgggcggatatggtcatcgcgccgcacgtagcgctcttcccggcggtggcgattttcctgactgtgctggcgtttaacctgttaggcgacgggttgcgcgatgcgctggacccgaagattaaggggtaagccagcccggtggcgttgacgcctggcgggcctggaacgggctcgtcaggcgggataacacatccggcacccgcgccgggggaggtggcgttaaacccgactgccccacaaatcatattcgtcggcgttttccactttcacgcgcacgatatcgcccggcttgacgttggtttcgccgttcaaatagaccgcgccgtcaatttccggcgcatccgccatgctacgcccgatagcgccttcttcgtcaacctcatcaacgatcaccagaatttcgcggcccactttttcctgcaagcgctcagcggagatttgctgttgcagttgcataaagcggttccagcgctcttctttcacctcttccggcacctgatccggcagctcattcgcgcctgcgccttccaccgggctgtacttgaagcagcctacacgatcgaggcgcgcctctttcaggaagtcgagcagcatctggaagtcttcttccgtttcggcggggaagccgacaataaaggtggagcgtagggtcagttccgggcagatttcgcgccactgcttaatgcgcgccagctggcggtcaacggaaccgggacgtttcatcagtttaagaatccgcgggctggcatgttgcagcggaatgtccagataaggcaggattttgccttccgccattagcggaatcacatcatcaacgtgtgggtaggggtagacgtagtgcagacgtgtccagacgcccagttttgataactgttcgcacaggctcaccatactggttttcaccggttcgccattatggaatccggtgcggtgcttcacatctacgccgtaggcggaggtatcttgcgaaatcaccagaatctctttgaccccggcatcaaccagacgtttcgcttcgcttaatacgtcgccaatcgggcggctgaccagatccccgcgcatcgacgggatgatgcagaacgtgcagcggtgattacagccttcagaaattttcagatacgcataatggcgcggcgtcagttttacaccctgttccggtacgaggcttaaaaatggattgtgcttcggcttcggtacgtaatgatgtacgtgctgcagaacttgctcatagctatgcggcccggtgatttccagtactttcggatgcacttcgcggatctgatcttcttttgcgcccaggcagccggtgacgattaccttaccgttttcgttcagcgcttcgccaatggcttccagtgactcttgtaccgcgctgtcaataaagccacaggtattaacgataaccatatccgcatcgtcatagcgtggcacaacgtcatagccttcggtacgcagctcagtcaggatgcgttccgaatcaacgaggtttttcggacagcccagggaaacgaagccgatctttggctggtgggttacattactcatagcttaaaaagtgttcatttattggaatggtcagggcagggattctacagatatccgaacaaaaattgtatcgcaatctcatcaggagcggcggcatcaaccgttgtggttatcagcaaaaggtgaaaaagggcaattctaagaaaattcttgatctctgacacccctttgtctaaaaaacgaccatactattaagttgaaccctggtagaaaagaggaggaaaaaaggtatggtcgttgacagactgagaaccgatcttctcaacaagctgataaacgcgcgtatcgatcttgccgcttatctgcaattgcgaaaagcgaaggggtatatgtcagtcagcgaaagtgacactctgcgtgacaatttttttgaactgaatcgcgagctccacgatcacgctttacggcagggactgcatctcgatcaggaagagtggaacgcgctgcgccgtgccgaaggcgcgcttgcagccgccgccgtttgtttaatgagcggacaccatgattgtccgacctttattgccgtcaacgcagataaacttgaaaactgtctgacaactttgacgctgagtattcagagtctgaaagcacattcaccgcttacacaggtctgaacaaggggaggcgactcctgaggaatccccagcaaaccaagacaggcatagtgttatgtgatctaattgattgcgctaacactttcaaggaaatcatcactatgcctgctcgttcattatgccaaaaatcctttaaaaatatactggagcctttgcacctttaccgccgtcaatctctgattgaggctaccagtgtagtgattaacggtgcatctcttacacttattcagtattgggcgtgatttgtcaggagtagcatcggtcaggcacaagataaaacgtatcgatcgacttcggggaaagtctcacttgcagaatgaagtttcagatactttttcagcgtgttactaaaaaatcacggagggaatgacccgggttgtcatgctctcctatatgccagcctgttttccgccaaaggtgactaaattcggttcaccagacaatcgttgatgttcttagggaacggtatagtcgaattcactcctgaaacaggtacggaatgtcggccgtttactattctgaaacgttatttatatcaaataattaaattttatttttatctttgttattgtaacaataaattacatgtttctttctgttatcagcgaacctgaaccaattttaatggggggttagataaaagctaattcagaaaattatttttttaagatatattgaattatcagatgctccattcaaatgagagacgagaatgcaaacgttagaacggttttttcttttcgttacgggggaccaacctgaacgatttgaaaaagcaaatagcagttgtgctgatagcgtaatccttgatttagaaaatgcggtgtcatctgagaaaaaaataattgccagagaaaatgctctgaatttcatgagtaatgatgaaaaagtactgattgctgtacgtgcaaaaattgtaataacttcacgcctggctggatcatatccttctgttgacggtatcacaactgaatttatgaaaaacgagttgacaatacaaaatgctattcactcctgtaaaatggggttcagtggcaaggtatgtattcaccctccacaaatttcacatgtaaacagagcattcagctatttaaaacaagaaatcgagtgggttccccagattatgcgactggctcaatatccccatggagcgttcagtcatgaagggcaaatggtggataaaccgttactggaaaaagcaaaaaggattttggctcatagcatttagtaaatatatgaaggagtcaccaatgaaagctttagtttgtgtaaaacaagttgtcgatcataacgttagaattagaataaagcgagatcattctgatgttgatatttctgattcaaaactcagtatcaatccatttgatgaaattgcagttgaagaagcagtacgtttaaaagaacggggattaatcagtgaggttgttgtagtgtctataggaaacacaggtgtaggggatgtattgcgtacagcactggcagcaggggcagacagggcaatacacatattaacaaaaaactctcttacaccactaattgtggccaaaactatcaccgctattacccggaatgaaaaacccgatattatattattaggcaagcaagctattgacgatgattgtaatcaggtaggccaaatgctggcagcattactcgatcttccccaagccactaatgttagtgaaattactatttctgataattcattaactgctgttcgtgaggttgatggaggattagaaacgttaaatttatccctgcctgcagtactcactacagatctacgtctgaatacaccgaggaatatcagcttgccgaatgttattaaagccaaaaagaaacctgttaaggagatagatttcgattcacttggtattaacccgtcatccagattgactattattaaagttgatgagccagcaagaaggaaagcaggcataatcgttccagatattaacacgctgctagataaattaaaaaacgaagaaaaagtaatttaaggaggaaaatatggcttctttagttattgctgaacataacggcaatactcttttaccttcaacactcagtactatcactgcggcaaaagccattaatagtgatatagatatacttatgttaggatatggtatagaaagtattgcagttaaagccagtcatattcaggggatatccactgtatttgttgctgacagcccactattcgaacaccttctggcagagaatgtggaaaaacagatcagctattttttgaatagtgggaaaaatcattatcagtccattctttttcctgcaagctcttttggaaaaaactgtgcgccacgcttagcagcaaaacttgatgtatctcagattagtgatattacgcgtgtcattgatcaacatacctttgaacgtccaatctatgcgggtaacgctattgccacagtacacagtgatgatgaatataaagtgataactgttcgtcctacctcatttgcggctgcggttgcggaagatgagggaaaagcccccattgaatttacagaggttgttcttggttcagatcaggtaaaatttattagccaacatgttaataaaagtaaccgtccagacttacaatccgccagagttgtagtatcaggtggacgaggagtaggaagtgcacaggcattcaaagaacttgttgataacctggcagataaattaggcgctgccgtgggggcaagccgggctgctgtagatgctggttatgcaccaaatgattatcagattggccagaccggaaaaatcgttgcgcctcaactttatattgctctgggaatttctggcgccatacaacatcttgccgggatgaaagagtcaggcgtcattgtcgctattaataaggatcctgacgctcctatcttttctattgcggattatggtttggtagctgatattttcaaagctgtacctgaacttatcgataaattataaatcatattttttcctccttaaaggtaacttttatgcaatatactgatattcaaatttggcagcctggcattctgcgcaacaccgattatcttaaccccggtcccgctaagctgctggccgccactctggataaagacatcaaaatctttaaagagggggggcgttctgccagaattatggcactggctctattttcttcctgtcgaccgccagtcagatctatctgctgatggtcatccgataaaaggtcattttctaccccctgttggcgctggtttattgaggaaaaaattatgaaaagtattgaaaaggataaatatcaggatattcgtgatgcggttcgttcattatgtagtgaatttgatgataaatatcaccgtaagatagatgaagcaaaagcctatcctgaagagtttgttaataaactaaccaaagctggttggctggctgcgctcatcccggaggaatttggagggtcagggcttggtttaactgaagcatctattatcatggaagagatcaatagatcgggtggaaactctggagcctgccatggtcagatgtataacatgaatacgttgttacgtcatggatccgataaacagaaagaattctggctgccacggatagctactggtgaatggcgcctgcagtcgatgggcgtcacagaacccacagcaggtacagataccaccagaattaaaactacagctgtaaaaagagaagaccggtatgtgataaacggacaaaaagtctggatttcacgtgttcaacattcagactggatgattcttctggttcgaactactccgcttgcaaatgtaaaacgtaaatccgaagggatgtctattttcatggttgatattaaagaagctatgaaaaatggaatgacagtacgacctattcccaatatggtcaatcatgaaaccaacgagctcttttttgacaacctggaaattcccgaagaaaatcttattggtgaagagggtatgggttttcattacatacttgatggtttaaatgcagagcgtaccttgattgcggcagaatgtataggcgatggatattggtttatggatcgtgttacccgctatacctgcgagcgtgaggtttttggtcgtcccattggtcagaaccagggggtgcagtttcctattgcagaagcatttattgcagtggaagcggctaatctgatgcgttttaaagcgtgcgagctttttgatcagcatcttgattgtggagcacaggctaatatggcgaaataccttgctgcgaaagccagctgggaagcagccaatgcctgcctgcaatttcatggtggatatggttttgcctgtgagtatgatatcgaacgaaagtttagagaaacacgtttatatcaggttgctcccatatctaccaacctgatcctgagctatatcgctgagcatgtgctggagatgccacgttcattctgatgtcaaatcaattggaaaaatattatgaaacagttacctctgtccggagtcattatagtctcgattgaacatgtcattgccactcccttctgtacccgacagttggctgattatttctcgcgggtaactataatagaatgccaagaaaacagggacttttcctgcaattatgatgaacggcttaaaaatgatttgtgtatattctttttcatctgagggagaaagctaaatataaatgttatggaatgcttcatcatcatcgacatttttttaatagttgataactggctatatagtcttataggcacctttttctaaggttgaacattcctataccatttcatctgttttatcactatgatatttatttcattggttacaatatgaatgcaattttatttacataatatagctgttcctacggtgctgaaaaattaaggagttaataatgaacgatacactttctaatacccagcaatcacgtgagacaatagaatgtgatgttcttattgtgggagcaggacccgccggattatctgcagctcttaaacttaaattacaggcaaatgacgcaggaaaagaactgtccattatcgtccttgataaaggagctgagcctggttctcatattctcagtggggcagtcatggatccccgagcgctgaatgaactaattcctgattggcaggaaagaggcgcacccattaaacagcctgttactcaggataaattactgttactgacgaatgaaaaatgtattaatttgccggatgcattgattcctgataattttcgcaaccatggaaactttatcgtaagcctcggtaatctcattaaatggctcgccggtcaggcagaaacgtcaggcgtggatatttatgcaggcttttcggcaactgagatactgtatgatcaggatactaacattatcggtgtagtaactggtgatatgggacgtcatcgggatggcagcaagaaagaggggttcctgagtggaatagaaattctggcaaaatatacaatttttgccgaaggggcccgcggtagtctggctaaagaactgatcaaaaaatttcatcttgatacaggcaaagcaccccagagttttagcataggcataaaagagttgtgggaggttccatcagaccagtcccatccggggcttgtaattcacaccacaggttggcctctggataaagagtcgttcgggggtgggtttctctatcatcttaatgataataaaattgcactaggtttggttgtgggacttgattattcaaatccctggttaagcccttttcaggaaatgcagcgcctgaaaacacacccttctatacgcaaatacattgaccggggtaagcgtattggttatggcgcaagagcaatcaataacggcgggattgcgtctatgcctgatccctgtttacctggtggtctgctgattggttgtaatgccggtacgctcaatgcaagtagaatcaagggtatccatacagctatcaaaagtggcatgatagcggctgacgctatatttaatgctttgctggacaacaggaaaaacgacatactgacagaatatcaaacattactgcgacagagctggctttggcaggaactggaaaatggtagtaatttcaaaccctggtttaaaaaagggcgtgtgataggttttattatgactggcattgagcattggctgcttccccgaatgggtataaaaaaaatcccctggcgtgtaaaaaataaccgaccggacaatatcactctgcaaccggccaacaaaagccagaaaaaactgtacgacaaacctgacggtaaactgacgtttgatattttgtcatccgtctatctcagtaacacctggcatgatgacgaccagccagtacatttgaaaatcagtgatcagaatatccctatatccattaatctggatatttatggtggccccgaagaacgatattgccctgccggagtatatgaatttttacaggatagtgaaacacaaaatatgcgtctgcaaataaattcacagaactgtattcactgtaaagtttgtgacattaaagatcctaaacaaaatataacctggactacgcctgaaggtggcaacggaccaaattatacagggatgtaacgctatcactcagtctgagctgtgagcatagtaaccagtttttgtgtgaagccgggtaatttgtcaaagcttctggcgcagatttgtaattttcttaatgaccaaaattcatcaagatcaataatcgaaaattcatgcaactgacgcaaacgggatgcagcagagtgaggcattataccaatgcccacttttgcttcaaccatacggcaaaatgtttcaaagttgccgacctgtattctaattttcagtttagatggtactagttctgccttttttcggataaattcaaacattcctgtcccttcaggcaggctgatttgttcatattgaattaattcatgaaaggtcacgctttttctgtcagcaaagggatggtctgtcgcggtgataagcactagcctatcagtacggaacggcagtatttcaagattatctgttgtaatattaccagcaacaattccgagatcagttttcccctcaataacagaacgtacaatttccggacttggatactccctgagatcaatattcacatcgttatatagtgtaaggaaatggcttaacaatggggggagatactctgcaatagcagttatactggaaaatattctgacatgtcctttgatgcctttaacatgctcctgcatatcgctacgtaacatttccatctgattcacaataaggctggcgtggtgtttaaatgtttcaccagcagaggataacgttatccccttgctactacgatacagcaatctcagattgatactctgttcaagattacgtatacgcacgctaccagatgcggcagacatgtaagttttttccgctccacgtgttatgctcccttcttcactgatagcaaggaataattttaaatcttttatatcaaagtgcatcgttgtggctcataattaacgtataatacagtgtgctgcttttttatagactcagtcagactgagtatttcggcctatccgaattcctgtcacgtcgagataactacaaaatgtaggctgacggtgtcaccgccctaccatgatccggggcggatctggtaggacgctggtgaccgctgacagggggtcaggtcagacatattgtcggaaccgttgtaacgtagatgctaatacctgctccccgtggtcatcaggttaacccgtttacagcggttttttcagccccggcagatttatcataaactgatcaccgtaaatatgtggaatcagccaagtaaagaacagattggcaaacgccaccacaaacaatgatacgcctccataggtcaataaagcgcatacaagaataatcatcggcatggctttgttctggcccaccatacaggtcacagcactgacaattgagtagtaaaaaccagcaagttcaatcagcttgccaaatactgcacccagcagaaagacaggaaaataaagttttacaaaaccgatcaacttatccataaatatatcactgaaaaccggggcgaccgtcactggacgggtgaacagaactgcgccaagtgctaccagcggagcaaaaaggatcacactgtaaccacgataagcgaccagcatcagtaatgaatacattcattgtcttatctcgctagcatgactacccattttatccatgttatgcaacagcttgtgtcatatttttctgatctccattttagatcagacaggctattactcagggattccggcgcgaagaatggaacatactctaaaaagtactcggcggattcaagtcggtatcactccgttaataatctttattctcgacccgctgcatgttgattttacggttaaacgccgttctcttattcatcgcaggagtaaaccatcatgacacgcagtgaaatccccagaaaacgatcatgtattcaatcgttgattatcgtttcgaataccgacttttatcgcaggatttatgatggctaaagtcgatgtgaaatgcccgttttgcgcgcaaacggcatccgttaaaaagtatggtccggggagtgcagggcaccagcattaccgctgtcaggtatgttgccgcagctttcaggtcgactatgaataccgcgcctgtcagcccggcatgaaagagcaggttgttgatcttgccatgtacactgccggtattcgtaatccgcaggggctggccatcaatccctggagcggcgcgctatggctgcatgaacacggtccgcgcggcggcgatgaaattaacatcccggaaaaaggcaaaaattatggctggccgctggccacatggggcgtcaactatagtggtctgaaagtgccggaagccaaaggtgaaattgtcgagggaacggcgcaaccggtttactactggaaggattctccagcgatcagcgggatggctttttatgccagcgacgtttttgcgccgtggcggcacaaactgtttatcggcgcgctaaaagataaagaggtcattgtgatgcgcgtcgatggcaatacggtgacggaagaaggccgtattctgggtgacagaaagcaacgtatctacgatgtgcgtgtcggacctgacggctacttatatgtgttaaccgatgagtccgacgggcagttactcaaggtaagtcctgcagccacgcgttaggtcaccgggatcatcaccactttgcgaaaagcagggcgctcggtaagctgctgataccagcgttccagattcgggcgcggcgtccatttcagacccacgttcagcaggttatagacgaaaggcgcaatagcgatatcaccggtgccaaagttatcccctgagaaccacggctggtgggccagcgcatcatcaagaagcgcaaacaggctatcacacttttcgataccggcttcaattgccgcctggtcgcgtttttccggcggggttctgaccagtcccatcaggatcacgcggtgcgccgggcttaacgtttgattcgcccagtccatccatttttcgccctccgcacgccgcgccggattatcaacccatagccggttctggccgtattgcgccgccagatagcggacaatggcattggattcccacaataacaggtcggtttcatcatctttaagcagcggcaccagcccattaggattcatcgccagatagtcggcatcctggttaacgccgaattttccgcctgccagaatttgatcgtatggcagttccagctcttcaagcgtccacaacacttttttaacattagtcgagttgttccggccccacagcgtaatcatattaaccccttccgttttatcaggatgatgacagtaatcggcctaccgtgagataaacctaacatttacacaatggtctgtaaaaaaatcgttatgaaggaagcgtaacgggatgttattgcataaactttaaaaactttaccaagttacggtttctttaacgtcgtgagtgcgttattactcaccgcacttattacacggtggtgtgacgtgtgtttttggaatggatactcgggtggtactatgacgcaatacgcttcttcccttcgtagcctcgcggcaggttcggttctcttattccttttcgcttcgcctgtaaaggcagaggaacaaacgatcgcgccgccgggcgttgatgcgcgagcctggatcttaatggattacgccagcggtaaagtactggcggaaggcaacgccgatgagaaactcgaccctgccagtttgacaaaaattatgaccagctacgtggtgggccaggcgctgaaggcagggaaaatcaagctgaccgatatggtgacggtgggcaaagatgcctgggcgacggggaacccggcgctacgtgggtcgtcggtgatgtttctgaagccaggcgatcaggtgtcggttgcggatcttaataaaggcatcatcattcagtcaggtaacgatgcctgtatcgcgcttgccgactacgtcgccggaagccaggagtcctttatcggcctgatgaacgcctatgcgaaacgactggggttaaccaatacaaccttccagacggtacacggtcttgatgcgccagggcagttcagtaccgctcgcgatatggcgttgctcggcaaggccttgattcacgatgtgcctgacgaatacgccattcataaagaaaaagaatttacttttaataatattcgtcagccaaaccgcaaccgcctgttgtggagcaccaatctgcatgtcgacggcatgaaaacggggacaacggctggcgctgggtataaccttgtcgcctccgccacccagggcgatatgcgcctgatctctgtcgtgctgggggcgaaaacggaccgtattcgttttaatgagtcagaaaaactgctgacctggggtttccgcttctttgaaacggtcacgccgattaaacctgacgcgacattcgtgacgcagcgggtctggtttggcgataagcatgaggtcaatttgggggcgggcgatgcggggtctgtgacgattccgcgtgggcagcttaaaaacctgaaggccagctttacgttgaacgaaccacagctcacggcgccgttgaagaaagggcaggttgtcggcaccatcgatttccagcttaacggaaaatccattgagcaacgcccgttaatggtgatggaaaacgtcgaggaggggggatttttcagccggatgtgggattttgtgctgatgaaactccatcagtggtttggcagttggttctcgtaaaataactccgtagccgggtgcgcgtcgcatccggctacgggcggttaatacatcagagtaatttgttgcgctttagcgtaggccacaaaggcctcatcgggacggcggtcgctgataatcgtatcaaagcgtgataattcccccatccgcgccggacgtaccttgccgaatttactgtgatccaccaccagtacatggcactgtgccattgtcattgcccaatgttttaccggcagctcttccagattaaagcaggtagcgcctttactggtatgaacgccagcggcggaataaaacgcgatatccggacaaatattgtttaacgtttcatggaaatcaagcggtttgaaaatggcgttgctggcgtgaaactccccgccgctgaggatggcgcggcaatggggtttgtcctgcagcgccaggaaggtattaagtgaatagcacaccgccgtaaagggaaggtcattatcaatggcttcaatgatccacggcgtggtggtgccgcagtcaataaataccgtctgatgcgcttgtaccaggcccgcagccagctgagcggctcggcgtttttcttccaccagacgagatttttgatcgcttaacagataatgactggcgctgcggggctccagtacgatatagccgcctagcaacacgacaggcgcgcttttatggttcaggtcgcgacgaatggtcatttcagagacgcccaacagggtcgcggcttctttaagatgaagtttatcgctgcgttttaaggcctgcagcaattgaccaatacgctcgtcgcgtcgcgtttccatagttcccctggagagttaaataagcgctccgcaccatacagagcgcttaatattactctttttttcgctatttagtcacgtacccagccttttcgaatgggcaatgcgaaacagaaacggtaacaacgttgcagcgcctggtagagcggcgcgccgtaccactgccagatcagctgtgcgctcaggcagccaagcatcgctaccagcagcgcgccaatcatatctaacggccagtgtacgccgagatagacgcgcgaccaggcgatggtaatggctatcgccatcatcacgatgcctgaccagaggcggtgccagaacaaaaacgccagcgcaaaggtaaaaatcaccgtaccgtgatcgctggggaacgagtcatcggcggcatgatgcaggaagttatagccgatatgatcgacaaacggacggtcgtgcgggaaaaggtgtcccattgtccaggagaccgccagactgataatcagcgcgatgccgattttaacgatcagctggcgctgggcgcagacccgatcgcggggcccccacagccagagtaccacggctaagagcgggacgatgttgatgacatctttggcgataaagatagcgagcgaaattatccactgcgcggaatcaggcgtggcgttaataaaataaaacagcgagttgttaaggttttccagcataacatccaggctcggagcaatgaaatcaaaagggatagccagctcatccccgtgcaaactgagcataaatgcagcgtaacagggaggaaaagcagtattgtcttatttggcggcaacatgaagagatttaagacaatggcataaaataacgttgatgataacggcgcaaacttaaattaaccttaaagtacgcaagcgctaagcggctttctgtaaaaatgtgcgctatttcccttgcagcctcataattcgctatctcagttccccgactttcattacactctgcgcggtttttattggcgaagagatggtatgcagaatcgtttacaatcaggcggcaggctgggacgtcaggcgctgctttttcctctctgtctggtgctgtacgagttttctacttatattggcaacgacatgatccagccgggtatgctggcggtggttgagcagtatcaggcgggcctggactgggttccgacgtccatgaccgcttatctggcgggcggtatgttcttacagtggctgcttggcccgttgtctgaccggattggccgtcgtcccgtgatgctggcgggcgtcgtgtggtttattgtcacctgcctggcgacgttactggcgaaaaacatcgaacaatttaccttcctgcgttttttgcaagggattagcctgtgttttatcggcgctgtagggtatgccgcgattcaggagtcctttgaggaggcggtgtgtataaaaattaccgcgctgatggcgaacgtggcgttaatcgcgccgctactgggaccactggttggggcggcatgggtgcatgttctgccgtgggaggggatgtttattttatttgccgcactggccgctatcgcctttttcgggctacagcgcgcaatgccggagaccgccacgcggcggggcgaaacgctgtcatttaaggcgctgggccgggattatcggttggtgataaaaaaccggcggttcgtcgcaggggcgttagcgctgggatttgtcagcctgccgttgttggcctggattgcgcagtcgccgattatcatcattagcggcgaacagctcagcagctatgaatatggtctgctgcaggtgcccgtttttggcgcgctcattgccggtaatctggtgttggcgcgtttaacctcccgacgtacggttcgctcgctgatcgtgatgggcggctggcctatcgtcgcggggctgatcatcgccgcggcggcgacggtggtttcatcccatgcttatttatggatgacggcgggattaagcgtatacgcttttggcattgggctggcgaatgccggactggtgcgtctgacgctcttttccagcgatatgagtaaaggaacggtctcggcggcgatgggaatgctacaaatgctgatttttaccgttggcattgaagtcagtaaacacgcctggttaagcggcggcaatgggctatttagcctgtttaatctggcaaacggtattctttggctactgctgatgctggtcttcttaaaagataagcggacggggaatttgcaaacagtctgagagagcggctacgcctgataagctttctgttatcaggcatagagaggcatccgctagacgttgaacggcggctcgttgtttaatacgctgtcgataatatccagcacgccttcctggttgttcgatccggcgcggtatttcgccgccgccgcgactgcttcgctggcgtgcgacatggcaaaactaaacccggcctgacgcagcatctcaatatcgttgccgccgtcgccgaataccaccacttcactatcatgaatgccccagcgctgctgtaacagacgcaggccgttggctttatgcacgccgggaataattaaatcaatactgccatagccggtatgaacgggaaccatgatatcgccaatggcgtcgtgcagcgccgcctgtacttccggtatccgttcatcggtaatattaaggccgaatttgaaaaagacatcgttgatattattaaaattatccacaaactccagacgatgataatacattgccgcaacggcttttaacgcatcgtcgtagcgtttcagcgtgtaggcgctgttttttccacaggcgatgatctccacatcggcgcgtgtgagcaggtgttcgacaaccgcctggaagtcggcttttgtcagctcgccgttaaaaatatcctcgccttcgctgaccacccagccgccgttttccgcgacaaaagcgatttcgtgcgcaatttccggaaagaacgagattaactggtaatactggttgccgctggccacgacaaagcgaatgccttgccgcttcatttgttggtactgcgccataaaccggtcacggttataggttttttgatcgctcagaaaagtgccgtccatgtcgacggcgattaatttgatactcatgcgttatgctccatcaccggttgcggagtcgatacaggtttggcgacggccttcgccaccagcgccgccagaataaccagcgccagcacaaccatcatggcgctgcgtaatccataatgctctcccagatagcccaacagcggcggcccgaccaaaaacgccagatagccggtcgtggcgacaacgctcacgcgcgtcggcgcgtcgggaccggtatcgctggcggcggaaatggtcagcgggaagccgagcgaagcgcctaagccccaaagaatgaccgagacgccggcgacccagtcgctatcgacaaaaataatcaggccaatgcccagcgctcccatcaacgcgctggcgcgaacaaccgtcacccggctatagcggtcaataaaccagccgccggtaaagcggccaacggtcataccaagcgtgaaaccggcgtagatcagagagccggaggttgggctaaaaccgtgtccgtctaccatcagtagcggtagccagtcattcgcagatccttcggcgaatgccattgccagcaccaccacgccaataagcaaaagctggatgtcccgataaaaaggtaatcctttttcctgaaggtgagaatcttccgatgcgtttttacccgtaccgtcagggatcgcccgaatggcgatgaaaatgggcgcgatcgccacggcagccgcgaggatgatatggatgttagccgggacgcttaatgcggttaacgccatgccgacaccagcgcccgccagcgtgccgaaactgtagaaaccatgcatcatcggcagaacggttttattcagctcgcgttcgaccgccgcgccttcgacattaatcgccacttcggcggcgccaaaactggcgccgaaaacggctaatccaagggcaaaaatcagcggcgaggcgcaccacagcgcgacgctaagaataaccatcccggttactgcacaggtcatcgtcgtgcgaataaccttccgggtgccaaatcgtttcaccagccaggcggaacaaagaataccgctcattgaaccgatagaaagcccgaataagaccgcccccatttccgcggtagagacggaaagaatatcccgaatagcaggcgttcgggttgcccaggaggccatcagcagtccgggtaaaaagaagaacataaacagcgcccaggtacggcgttttaaggcgttacgtgaggagaggacggtcatagcgtcaggccagaaaatagaagcgagaggtaaacattagcaagcttgtgtacatttgtacatatcatcgtcatacttcattgtgcagacagtttttactgtctgttttttcagcgtaagcggcaggctactatcgcctgcatcctgaatgagatgtggaactcatcatgaaagaaaatgccgtaagacgcgccaatgatcctaagcgacgggaaaaaataattcaggccacactggaagcggtaaagacctatggcgttcatgccgtgacgcaccggaaaatcgccgctatcgctcaggtgccgcttggctcgatgacctactattttgccggtatggatgcgttattgagtgaagcttttacacttttcaccgagaacatgtcgcgtcaataccaggacttttttgcgcaggtgacggatgcggagggggcgtgccaggcgataacggaaatgatttacggctcgcaggttacgacgccggataatatggcgttaatgtatcagttatatgcctatgccagcgataagccggcgttaaaaatagtcatgcaaaactggatgcagcgtagccagaatacgctggcgcagtggtttgacgcacagaccgcccgagcgctggatgcgtttatcgaggggatgacgctgcattttgtaacggatcgaacgccgctggcgcgtgaagcgattttacagatggtaaagcgaatcgccggagtgtcaatgtcgtgtcactctgcgttgggcaacaaaaaacccaccaaccttgaaccgaaatggcggggttgatgggctccacaaaatggggacatcaaagaaaagcagtggcaataggtatgactgatgctttaacgaaaagttcgacctattggcaaaattttttcacttaaaggcaaacttcagttttatcctaaccccggccagatgatgacaataagcgtccccgccagcgttagcagaacgttggcgatggcgtaagtccccgcataacccagcgctggaatattactgcgcgccgtatcgctaatgatttccatcgccggggcgcaggtacgcgcgcccatcatggcaccgaacagcagcgcccggttcatgcgcagcacataagcgccaaacaagaagcagatcaccaccggtaccaggctgacgacaagcccggcgatcagcatttgtccgccgaccgcgcccagaccgttgctgataccgctgccggcgcttaaaccaacgcctgccataaacaccatcaagccgaattctttcaccatattaagcgcgccctgcggaatataaccaaaggtaggatggttagcgcgcaggaaaccgagcatgatcccggcgaacagcaatccggccgcgttgccgataccgaaactaaaattgctgaactggaaggtaatcatcccgatcattaacccgatgataaaaaaagcgcagaaggcaagcaggtccgtcacctgactatgaatcgaaataaaaccaatgcgatcggcgatggtttttacgcgtctggcgtcgccgctcacctgtaacacgtcgcctttattcagcacgacgttatcgtcgataggcatttcgatctggctgcggatgacgcggttaaggaagcagccatgatcggtcagcttgagctgagcgaggcggcgaccgaccgcattgtggtttttcaccacaatttcttccgtcacgatgcgcatatcaagcagatcgcgatcaaatacttccttaccattacggaagctgggatcgagcctggcgtgcgcgtccggatagccgaccagcgcaatctcatcgcccatttgcagcaccgcatcgccatccgggttcgccagaataccgttacggcgaatacgttcgatatagcagcctgtctggcggtaaatacccagctcgcgcaggtttttaccgtcagtccaggccaccagttccgggccaacccgataggcgcggataaccggcaaataaaccttgcgattagcatcggtatccagaccgcgctcgcgagcaatttgctgggcgctggtttgcaaatcctgatgctgtagtttaggcaagtagcgcgcgcccacgatcagactgaccaacccaatcagataggtcagggcatagcccaggctcagattatcaagagcggaggagagttgggtgctggcgatgccggaatgtcgcagggtatcgcctgcgccaaccagcacgggcgtggaggtcattgagccggccagcataccggccgtcaggccgatatcccagccgaatagcttaccaaggcctaaggcgattagcagagcgctaccgaccatgaccagggcaagcatcagataatttttaccgtcgcgaaaaaaaatcgaaaaaaagttggggccagcctcgacgccgacacaaaaaataaacagcataaatcccagatttagcgcgtcggtgttaatactgaagtgttgctgccctaataatagagagaccactaaaacgccaatggaattaccaagttggactgaacccagacgtaacttgccaagacacaggccaagagccaggaccacaaataataacaggatgtaattcccatttaacaaatctgcgacgtttatattcacggagactaacttcttgtttacgagtaagctgttgaaagaaatggtaatttacgctactgtttttatcatgaattaagggtgcaatcgtattgcatacagcatccaaataaaaacaacacaacaatatatcctgctagtttaatcttattgcgtactaacggctataagaatcgtgcaggtgtgtttttggcatggaatgccacatgactttatctgactggatgcctcacggcggaaagcgtgttcgatagagagtgtcaggaggaacgattgaaacataaacacgggtgggcaagcgttgtctgctgctttgtactctttattgtggtgtgtctttcattaactatgcatgtacaaggcgcttttcgcgcggcagggcatcctgagattggactgttattttttacgttgcctggtgcggtggccagcttttgttctcaccggcgcgaggtgatccgaccgctgatcggggcgatgctggcggcgccgttttgcctggtgttaatgcgcgtggtatttatgcctacccgatcgttttggcaagaactcgcgtggttatttagcgccgtattctggtgtgcgttaggcgcgctctgttatttgtttattagcagcctgtttagccaccggcgaaaaaaacgccgatagcgccctccgtcagagggcgttgccagagcaatcaggcgaaaagattcagattttcttttgcccatgcttcaaaatccgtacagccgccgatatgtttttgatcgacaaaaatctgcggtacggtttctacaggtttacctacggttttttccaaatccgctttagtaatgccttcagcatggatatcaatatagcggtagttgaaatcgtcgcgttctttgctcagtttttccgccaactcttttgcacgcacgcaataagggcaccctggacggccaaaaataacagtaaacatatctctcctcgaacataaagccagacggcgaacaggtgttatcatgccgcgatttacggcagatgaaaagcaggttacgcctgttcctttgataacccagggctatatctgttaagcacgccggaccagaacgttctacactgtgcgtcagttaaccgggaggcttgatatgcgcacgattggcgtgttacccaaaagcgtactgatactggaatacctcggtatgattttgctggcgcttgctctgctatcgcttaatcattaccttacgctgcccgcgccgttcaatacgccgctggctggcgtattgatggttttcctcggcgtcgtgttgatcctccccgccgcggtggcgatgatgtggcgtattgcgcagttactggcgccgcagttgatgaaacgtccacccgacatttcttcccgttcagatagagaaaagcataatgagtccgaccattgaacttctttgtggccatcgttctattcgccatttcaccgatgaacccgtgactgacgcgcagcgagaggccattattgccgccgcgcgcagcacgtccagttccagttttttacagtgcagctctattatccgtattaccgatcgggcgctgcgtgaggcgttagtgcccctgacgggcgggcaaaagcatgtggcgcaggccgctgagttctgggtattttgcgccgattttaatcgtcatttgcagatctgtcctgacgcgcagctggggcttgccgaacaactgttgctcggtgtcgtcgatacggcgatgatggggcaaaacgcgctgacggcggcggaatcactggggttaggcggcgtgtatatcggcggcatccgtaacaatattgagtctgttaccgaactattaaaattgccgaagcatgtattgccgctctttggcctgtgtttgggatggcctgcggataatccggatctgaaaccgcgcctgcctgccgagcttgtggttcatgagaaccagtatcaaccgcttgatgaaaagctgctggcgcgctatgacgagcagttggctgagtattatctgacccgcggcagtaatacgcgacgcgatacctggagcgatcatatccgtcgcaccctgattaaagaaaatcgcccatttatccttgaatatttgcataaacagggctgggcgacgcgctaaaacctgcgggccagtgtatgatacgcgggcttttcagggttttcagcgaggtgcagggtgaaaattgccatattgtccagggatggaacgctctattcttgcaaacgtctgcgcgaagcggcgatgcggcgcggccatctggtcgagatactcgatcctctttcctgctatatgaatattaatccggcagcgtcgtcgatccattacaaggggcgtcgtctgccccattttgacgccgttattccccgtattggttcggccattaccttttatggtaccgctgcgctacgtcagtttgagctattgggtagctatccgctgaatgaatccgtcgccattacccgcgcgcgcgataagctgcgatcgctacaacttctggcgcgccaggggatcgatcttcccattaccgggatcgcccattcgccggatgataccagcgatcttattaagatggttggcggggcgccgctggtcgtgaagctggtagaaggcacgcaagggatcggcgtggtattggcggagacgcgtcaggctgctgaaagcgttattgatgcgtttcgggggctcaatgcccatatcctggttcaggaatacattgccgaagctaaaggatgcgatattcgttgtctggtcgtcggcaatgaggttgtggcggcgattgagcggtgcgcgaaagccggtgattttcgctccaatcttcatcgtggcggggtggccagcatcgcgacgatcacgccccgtgaacgggatatcgccatcaaagccgcacagacgctggggctggatgtggcgggtgtcgatattttacgcgccgcgcgcgggccgctggtgatggaggtgaatgcctcgccgggactggaaggtatcgaaaagactacgggcgtggatatcgcggggcgaatgattcagtggatagaacgtcacgctacgcctgaattttgccttaaaatcggcggctaatcgcaatcgtggattccgccgtagtacgaagcacgctttttgcgtaagctgtgccggtaattttttcatcgtcatcgtaagaggtagcactttattatgatatcactggtcgttcccactctggatacgttgcgtcaatggctcgacgacctgggcatgaatttcttcgaatgtgatacctgccaggcgctgcatttgccgcatatgcagaattttgacggcgtctacgatgctaaaatcgatttggtggacaacaccgttcttttttccgcgatggcggaggtcaggccttccgcgttgctgccgctggcggccgatctctctgctattaacgccagttcgttgacggtaaaagcctttctcgatatgcaggatgataatctgccaaaactggttgtgtgccagtctttatccgttatgcaaggcgtcacctacgaacagttcgaatggtttgttcgccaaagtgaagagcagatttctatggtgatccttgaggccggggcgcatcagcttctgtttaacgcggaagaagacgcgcaaaaaaccagcgcagttgaccattttcttcactaatcccttccgataatcaggcagtcgctgccagcgcggctgctgtttacacttttttatgctgctattaacctttatttaaagaattattcacctcctttctgaccatttcgctttatcacatagacaaaacctgcataaaaaattgataaaaggcgttttttaatctgggctatagcctcaaaccttagctaaagttattcttgcgaagcttctatagcgagcttgatggcagggagggcgacctctcttcttcatttgtatcaaatgaaaaggtatgcacatttcaggcatgttttaaaccacgcctaatgggttcatttgttaacggatttcagaaggaaagcgatgatgaccgccttaaagaaaaaatggctatcgggtctggttgcgggtgctctgatggtcgtctctgtcggcacgctcgctgccgaacaaaaaacgctgcacatttataactggtcagattatatcgcgccggacacggtggcgaactttgaaaaagagaccgggattaacgttatctatgatgtctttgactctaacgaagtgctggaaggcaagttaatggcaggcagcaccgggttcgatctggtggtgccatcggccagttttcttgagcgccagctcaccgcgggcgtttttcagccgctggataaaagcaaacttcccggctggaaaaacctcgatcctgaactgctgaaactggtagcgaagcacgatcctgacaacaaatacgccatgccctatatgtgggccacgacgggcattggctataacgttgataaagtgaaagcggtgctgggggatgatgcgccagtgaatagctgggatttagtcctcaagccggaaaatctggagaagctaaaaagctgcggcgtctctttccttgatgcgcctgaagaaatttttgccactgtgctgaactatctgggtaaagatccgaatagcagcaaagcggatgactacaccggcccggcaaccgatctgttgttgaagctacggccaaacattcgctatttccactcctcgcaatacattaacgatctggctaatggcgatacctgtgtggccatcggctgggcgggcgatgtctggcaggccgctaaccgagcgaaagaggcgaaaaatggcgtcaatatctctttctcgatccccaaagagggggcaatggcgttttttgatgtgtttgccatgccggctgacgccaaaaataaagacgaggcctaccagttccttaattatctgctgcgccctgatgtgattgcccatatttccgatcacgttttctacgccaatgcgaataaagaggcgacggcgctggtcagccagcaggtgcgcgataacccgggaatttatccgccggcggatgtgcgggccaagttgtttaccctgaaagtgcaggagccgaagattgatcgcgtccgcacccgcgcatggacgaaggtgaaaagcggtaagtaatttattaacggtatggcctgataagcgtgcgctatcgggcattccaccgtttgtatcgtttgattgtgttatgccggagagcgccttgtgaatgatgtcccccaccgcccgcaggtgaaaacccgtaaagcgctgacgccgcttctggaaattcgcaacctgacgaagtcattcgacgggcaacatgctgtcgatgatgtcagtctgactatctataaaggcgagatttttgccctgctgggcgcgtcaggttgtggaaaatcgactctgctacggatgctggcaggttttgaaccgccgagcagcgggcaaattatgctcgacggcgtcgatctggcgcatgttccgccgtatcagcgtccgattaatatgatgtttcagtcctatgcgttgtttccgcatatgacggtagagcagaacatcgcttttggtctgaagcaggacaaactgccgaaggcggagattaccagccgcgtcaatgagatgctgggtctggtgcacatgcaggagtttgcgaaacgtaagccgcatcagctttccggcggtcagcgtcagcgcgtggccctggcgcgcagcctggcgaaacgtcctaagctgctcttgttggatgaaccgatgggcgcgctggataaaaaattacgcgaccggatgcagctggaagtggtggatatccttgagcgcgtcggcgtgacctgcgtcatggtgacgcacgatcaggaagaagccatgacgatggcggggcgcattgccatcatgaaccgtggaaaatttgtgcaaattggcgaaccggaggagatttacgagcatccgacgacccgctacagcgccgaatttatcggatcggtaaatgtttttgagggcttactgaaagcgcgtgaggaggacggtctggtcattgacgcgcccggtttggttcatccgttaaaagtcgatgcagatgcctctgtcgttgataatgtgccggtatatgtggcgctacgtccggaaaaaatcatgctgtgtgagtcgccgcctgccgatggctataatttcgccgtcggcgaagtggcgcatattgcgtatctcggcgatctgtctatttatcatgtgcggctaaaaagcgggcagatgatcagcgctcaactgcagaatgcgcaccgttaccggaaagggttaccgacctggggcgatgaagtgcgtttgtgctgggaagcggatagctgcgtggtcctgacggtataagggggaaacatgagcacacttgaacctccggcacgcatcagtaaacctggcggcgcggcgctatggttggcgcgaatgcaaatgaaacatgggcgtaagctggttattgctttgccttatatctggctcattctgctgtttttattgccgtttcttatcgtctttaagataagcctggcggaaatggcgcgggcgatcccgccgtataccgatctgctggaatgggctgacggtcagttgtcgattacgctcaatctcggtaattttttgcaactgaccgacgatccgctttatttcgaagcctatctgcaatcgttacaaattgccggtatttccacaatctgctgcctgctgctgggctacccgctggcgtgggcggtggcgcacagcaagccctccacgcgcaatatcctgctgctgttggtgattctgccctcgtggacgtcttttttaatacgcgtctatgcctggatgggcattttgaaaaacaacggtgcgctgaacaatgtgttgctgtggctaggggttatcgatcagccgctgacgatcctgcacactaacctggccgtctatatcggcattgtttatgcttatctgccgtttatggtactgcccatttataccgcattgacgcgcattgattattcgctggtggaagcgtcgctggatctcggcgcccgaccgctgaaaacattttttagcatcattgtcccgctcaccaaaggcggaatcatcgccggctcgatgctggtttttatcccggcggtgggtgagttcgtgatcccggaactgcttggcgggccggacagtatcatgattggtcgcgtcctgtggcaggagtttttcaataaccgcgactggccggttgcttctgcggtcgccattattatgttgctgctgctgatagtaccgatcatgtggttccataaacatcagcaaaaaagtgtgggggagcacggatgaataacttaccggtcgttcgctcgccctggcgcattctgattctggtgctggggtttacttttctctatgcgccgatgttaatgttggtgatttactcgtttaacagttcgaagctggtgacggtgtgggcgggatggtcgacgcgctggtatggcgagctctttcgggataccgccatgatgagcgcagtgggactaagcctgacaattgccgcctgtgcggcgacgatggcggtggtgctcggtaccattgctgcggtggtgatggtgcgatttggacggtttcgcggcgcaaacggctttgcgtttatgatcaccgcgccgctggtgatgccggatgtgattaccgggctgtcgctgctgctgctgtttgtcgcgctcggtcatgctatcggctggccctccgatcgcgggatgctgaccatctggttggcgcacgtcactttctgtactgcctacgtggcagtggtgatcgcttcgcgattacgcgaactggatcgttcgattgaagaggcggcgatggatcttggcgcggcgccgttaaaggtcttttttgtcattacgttaccgatgatcatgccagcggtgatctcgggctggctgttggcctttacgctttcccttgacgatctggtgattgccagcttcgtttccggtcccggcgccaccacgctaccgatgctggttttctccagcgtgcgcatgggcgtgaacccggaaatcaacgcgctggcgacgttaatcctcggcgtggtaggaatcgtcggatttattgcctggtacctgatggcgcgagcggaaaaacagcggattcgcgatatccagcgtgcaagacgcggctgaagccactaaaatcttccactatggcaatgcgttgccgcgcgggtcgcggcatcattttcagggaagacattcattgggatttataaagcaatcaacctcatcacatgcccgtttaaatgtgcctacgctggtgcaggttgcggctatggcgattattttgattcgcggtctcgatgtgctgatgattatgaataccctcggcatacgcgggatgggcgagtttattcatcgcagcgtgcagacgtggagcttaaccctggtctttctggccagcttagtgctggtctttgttgaaatttattgtgcgttttcgctggtgaaaggccgtagctgggcgcgctgggtgtacctggcgacacaaattattgtgagcggatatctgtgggcggcgtcgttaggctacgggtatcctgagttgtttagcatcgcgggagaatcgaagcgtgatatcctgcattccctggtcatgcaaaaactccccgatcttttaattctgtttctgctgtttattcccgctcccagccgtcggttcttccggctgcaataatgtgtataatcgtcgccccggataatatgaaggttttttggtatgcagtgcgcactctatgacgcgggtcgctgccgttcctgtcaatggattacgcagtcggttaacgaacaactttccgcaaaaacagccgatttacatcgtttgctcgccgggctgcctgttgaacagtggtgcgcgccgattggcggcccggaacagcatttccgcaacaaagcgaaaatggtcgtgagcggtagtgtagaaaaaccgctcttcgggatgctgtatcgcgacggtacgccggtcgatctttgcggctgcccgctgtatcccgcctcctttgaccccgtattcagcgcgctaaaaccttttattgcccgggccggactcacgccttataacgtggcgcgaaaacgtggcgaactgaaatacctgttgctgacggaaagtcagttcgatggcggcatgatgctacgcttcgtgttgcgttcagaaaccaaacttacgcaactgcgcgcggcgttaccgtggctgcgtgcgcaactgccgcagctcagagtgatcaccgcaaatatccagccggtacatatggcgattatggaaggggagacggaaatctacctgacggatcagcaggcgctggcggaacgttttaacgatgtgccgctgtggattcgtccgcaaagtttctttcagaccaaccctacggtcgccagccgattatatgcaacggcgcgcgattgggtagggcaactgccggtacgccatatgtgggatcttttttgcggagtgggcggattcggcctgcactgcgcgacgccgcagatgcaattaaccggtattgagatcgcgccggaggcgattgcctgcgcgaagcaatccgctgccgagctgggattgacccgccttcatttccaggcgttggattccacccaattcgccaccgcacaaggcgaaacgcccgatctggtgttggtaaatcctccccgccgcggcattggcaagccgttgtgcgattaccttgcacaaatggcgccgcgttttatcatttattcgagctgtaacgcgcagacgatggcgcaggatattcgtcatctgccgaactaccgtattcaacgtgttcagcttttcgatatgttcccgcataccgcgcattatgaggttttagcgttactgcgcaggtcaatataatctattcacaatatttatttttatcccttaactatttcataaaaataataaatacaatcaattgattatttaattcaattggttgtatttatatattaccctatttttgcaaatcaaatcacaaataatcactttaaatcttttaatgactacttttgattattacagtgcgtgtaaggcaaaattagacaaggtggtttatcgggtaactttcaatagcatcagcgaagcaatacgtaacgtcagtaaaggggtcaatcatgacaacgaataggcacgcttatggagggcgttcagacgatgtttgccaaatttatagatgttattcaaacgtttttaactgaaccggcaatattaattgggatattagtcggtgttggctatgcgctggataaaaagacgcctataaaaattatcaccggtatgatcagcgcgatggtcggtttgatgatggtgttatttggcggctttcaattttcagccacttttaaaccggttgcagaggcagtcagcaaagcttatggcgtgcatggatacttaatggattcatacgccatgaaagccgcgacgcaaatagcgctgggcgataatttcggctatgtaggatacgtttttgtactggcgttttttactaacctgttattagttttatttggccgttataccggcgcaaaaggtatatttcttaccggtaataccggggtctctcattcacaggcagtactgtggttaatcgtcttctggctggggttcggttgggtacaatccattgtaattgccggggtattgaccggggtcttttgggcgttttcaactacgcttattgttaaacccatcgccaaagtgaccaataacgccggttttaccattgcgcataaccagatgctgggactgtggtttttctcgaaattcgcgcataaattcggcgatccggaaaagcatgacgccgaaaacctgaaacttcccggttggttagccatttttaaccacaacgtgacggcaatcgccattgtgatgacactcttcgttggcggttttctattggcgacagggatcgataacgtacagttaatggcgaaaggcaaaccctggtatatctatatcatcaatctgggcctgcaattctctatgtatatggtcatcttgctgcagggcgtgcggatgatggttggtgaaattaacggttcgtttaaaggatggcaggatcgctttattcctaacgctataccggctgtggatgttgctgctttattacctttttcgcctaacgcggccacgctgggattcgtcttttgtactttcggcacgattttttccatgggcatcctgctgctcatccatagccctattatggtattgcctggttttgttccgctcttcttttccggcggtcccatcggcgtattagccaaccgaatggggggatatcgttccgttattatttgtactttcctgttagggattattcagactttcggtacggtatgggccattcctttaaccaggctggcaaaagaaggtgtgggctggacgggaatatttgactgggcgactctgtggcctgcaatttgtgaattactgaaatttattgcttcaacgttccatcttggtccttattccatttaattgattcggtttatataaaggattttattatgaaagattctgtaaatattttattcgtatgcggttatggtgtaggcagtagcgtaatgttacagactgttgttaaaaaagcgttagcaaaatatgacttctcttttgatatggagcatacggcagcgggagaggtcggtggatttaccgactgggcagatatttatgcgatttcgaaaaaattgcttgatgttgttagcctcgatcctaaacacggacaatatctcattcccattgaaaatatcatggatggcgaatcaataggtaaacagatttacgatgtggtagagaaaaattttccgcacctgctcaacaaatgagggtgagtcatgaaagcgattattctgctgtttgacagtctgaataaaaactatttgccgccctatggtgatttgctaacgaaagcgcctaactttcaacgcctggcggcacatgccgccacctttgacaatagttatgtcggcagtatgccctgtatgccagcccgtcgggaactgcacaccgggcgctataatttcctgcatcgtgagtggggcccgctggaaccctttgatgattccatgccggaattattgaaaaaagcggggatctacacccatcttatcagcgatcatctgcattactgggaagacggcggcggtaactaccataaccgctatagctcctgggacgtagtacgcggtcaggagggcgatcactggaaggcgagcgttggcgagccgcccattccggaagtactgcgcgttccacaaaaacaaaccggaggcggcgtttccgggctatggcgtcatgactgggcgaaccgcgaatacatccagcaggaagccgattttccccagacgaaagtttttgacgccgggtgcgattttatccataaaaatcatgccgaagataactggttattgcaggttgagacgttcgatccgcatgagccgttttataccaccgaggaatatttatcgctctatgacgatgagtggcaaggcccgcattatgactggccgcgcggcaaagtcagtgaaagcgaggaggcgatagcgcatattcgctgtcgttatcgggccctggtttccatgtgcgaccgcaatctgggacgtatccttgatctgatggatgaacacgatctctggcgcgatacgatgctgattgtcggtaccgatcacggcttcttgctgggggagcacggttggtgggctaaaaatcaaatgccctattataacgaggtggcgaataacccgctgtttatctgggacccgcgcagcgcggtatgcggagcgcgacggcagtcgctggtgcagatgattgactgggcgccaacgctactggattattttcagcaacctattcccgcagatatgcagggccaaccgctggcgaaaatcattgccagtgatgaacccgtcagggaaggcgcgctgtttggcgtgtttagcggacatgttaatgttaccgacggacgctatgtttatatgcgggccgcgcagccggggcgtgagcatgacattgcgaactacacgttaatgccgatcaagatgaatgcgcgttatgacgtggatgaactgggaaaattatctctggcgcctccgtttaactttactaaagggcttcaggtattacgtattccggccagggaaaaatataaaggtgtgaatagctttggtcatctcttgtttgatctcagagacgatccgcagcagcaacatcctattcatgatgaggccatcgaagcaaggatgatcaacttacttatccgtttgatgaaagaaaatgatgctccggcggagcagtatcgccgtctgggtctggatgttgtctaaaaacgtaacaatgttgtaagccgggtgcgcgttagcgtcacccggcaagtattagtccgaatcgcctgttgatgcaggcgtttgagactgatgacaaactgtagaatgctcaatggcgctgcgcttatcaggccaggatagtttccgatggcggcccgtgggctgaataaggtatttatactgccatttcgcaacacggtgggctaatcacatacgtcttactgcgggaaccactgatcgctgattttctgataagtgccgtccgctttaatggcggccagcgcattattcagtttttccagcaacgccttattgtccgggcgcaccgcgatgccaagtccggtaccgaagtattgcggatcggtcactttctctgttgccggacccagttgcggattcgttttcagccactcattgaccactgcggtatcgccaaagacaccgtcaatacggccatttttcaggtcgataatcgcattctggtagctgtcgtaggccacggttttgacctccggatgtttatcctggagatatttttgatgcgtggtgccattttccataccgatacgcttaccttttagatcggtaaaggttttataggtgtcttttttggcaatcaccagcgcggagttcgcataatagggattgctaaaggcgacctgcttactgcgctccggggtaatgtccattccggaaatgacggcatcatattttctgaatttcagcgccgggataagactatcgaaagcatgattggtaaaagtacattctgcctgcatttgcttgcataatgcggttgccagatcgatatcgaagcccacaattttattactcgcatccagggattcaaacgggggataggtggcggaaaccccgaaattgattttttcagcggcgatgctgccagtggcgaaagaggcgagtaatgcagccagaactaactttttcatgatgtcactcccgtaatcttatgattatgcgccgtgtctgcggcatagatttacaatgccatcaattgaatttgtatgcaataaaaatgattaaatattttaaaatggataaaaaaagacggacaggttaaccacttgtccgtcggatttattcaatattatgcatcgtaggtttgataagcgcagcgccatctgaccattgtcgaacggcggcgagaatgccttatcctgcctggttaattgcgccgctcaaacgccagagctttacgctcaatcaaacgcatcatcagcgtcaatagaccgttgacgaccaggtaaattacgcctgccgcgccaaataccaccacatcgtaggtacgaccatagagcaactgactgtaccccatgacttccatcaaggtgatggtataggccagcgaggtacttttgaagaccagtaccacctcattagaataggaggagagggcgcgtttaaacgcatagggcaacaaaatcgccagcgtatctttcttactcatccccagcgcgctacaggactgccactgaccttccggaatcgcgcgaatcgcgccataaaatagctgcgtggtgtaagcggcgctgtttagcgacaacgcgatcagtgcgcacagccacggttcagacagtagatgccagagtagtggatactcttgcagcgtcgggaattgaccgggtccgtagtagatcaggaaaatttgcaccaacaacggcgtaccggtaaacagcgtgatatagccgcgcaccagccacaccacgaacggtgtttttagcgtcaggatgatggtaaaaactaacgccagcaccaaagcgacggcaatagaagccacggtcagcgtcaggctggtgtgtagcccttttagcagttcaggtaaatactcaagcattagtccggcctccgctcaaaacgtgtcgcgcgcaggtctatgcgtttgagaatgtactgactgatcagcgtaatgaccaggtaaatagccgccgcaataatgtaccagttaaacggttcctgggtgcgtgtggcaatacttttggtctgcaacatcagatcgttaacgctgataaggctgaccagagccgtatcttttagcaacaccagccactgattacccagccctggcagggcgtgacgccacatctgcggcatcaccagacggaaaaaaatcgccgtctttgataatcccagtgcctgacccgactcccactgaccagacggaacggctttcagcgcgccacgtagcgtctgcgacgcataggccgcatacagcagggacaacgcaatcacgccgcacaggaacggactgacgtcaaagttctcaatctccatttgcaccgggatctgcgtaaagccgagatggagggtaaacccgtcagacagcgtaagcaggagttgcgaggagccgaaatagataaacagcaccaccagaatttccggcaggccgcgcaaaatagtgaccagcgcggagcctatccaggcaatcgggcgccattttacggactcccagacggcaaagaacatggctaacgcgaggccaatgatcagcgcacagacggcaaggccgacggtcatcccggcggcgcttgctaaaggaaaaaattcgttcatcaaagattacttctggaaccatttgttatagatggtctcgtaagtcccatctttcttcactttttccagcgcagtattgaatttctgctgcagctcggtgttgccctggcgtaccgcgatacccaggccggtgccgaaataatctttatcggtgactttatcgccgaccggcgccagcttaggattggctttcagccattcggtcacgaccgccgtgtcgccgaaaacagcgtcgatacggccattttgtagatccagcttcgcgttctgatagctgtcatacggtacggtggtgatttccggatgcttatccatgatgaatttctggtgcgtcgtaccgttctgtacgccgactttcttgcctttcagttgatcaacgctggtgtatttgccctgctgacccacgaacagcgcggagttgtcgtaatatggcgtggtaaacagcacctgcttttcacgttccggcgtgatatccattcccgccattacagcgtcgaagcggcggaatttcaggctggggatcaggctgtcgaacgcctgattggtaaaggtacaggaggcgtcgatctctttacatagcgcgttggccaggtcgacgtcaaagccgacaatcttgttattagcatccatcgattcgaacggcggataggacgcttcggtcgcaaaacgaatggtctgggctgctgtagcggaaaggctaaagcctgcaattagcgcggcaatcagaacttttttcattgtcattgtcccgaatcttagtgagagagatagtttttgaacgcttcggtctgagggtgggcaaagcaacccgcatcaccgtgctcgacgatgtgaccattttccatataaatcacacgactggcggtcttacgcgccacttcgacttcatgcgtaacgatcacctgagtaatgttcgtttccgccagctcatgaataatgctgacgatttgagcggtaatttccgggtccagcgcggcggtcggttcatcaaacagcagcacctgcggctccatcatcagcgcgcgggcaatcgcgacgcgctgctgctgaccgccggaaagatgcaacggataacgatcgctatagggcttcagacgtaaacgctccagcagcttttctgcgcgcgccagcgcctgatcttttgtcagacccagtacgcggcagggcgcttcaatcagattctgcacaacggtgagatgcggccaaagattatattgctgaaagaccattccgacattttgacgtagctcacgaatcgccttatcggacggcgttttcgtaaagtcaaaatggttcccggcgatagtcagagtgccggagcgcggcatctcaagcagattgagtacacgcagcagcgaacttttacccgccccgcttgggccaagcaacaccagcgtttcgccttcggggcaatccagcgtgatatcgaacagcgcctgatgcgcgccgtaaaagcaattaatgccgtttaattgaatactcattgacactcgtatacaggcagtctgatagctattgaagccgcagatagtacctttcgcagaatagttatgcaatatttatgcgttaaaagttaaatatatcccacattcttccctaaacatagcacaaaatagcaggaggaatagtaggtaagaagaattgtcggcatcccgggcagaatgccagacaatttacggggttatgggtgcaaaagcgggggaatactgtctgttaacggttttctatcgactggcgcagcgtaccggcaggggcatggacatctccgcccagatagcgaacgtcgtcaatcacccagcatgagccttcgtgaatcataagcacttcatcctgccagctttgatcgccctgttttaacgctacccgcagaggaatgttgcgcgcatctcggttcggaatggttgatgcgctggcgacgttggcgctatccggcagcgtagcgcggctggagaacagatcgccgctcatcaactggcggtgctccgtatcgcggctggcgtcggttaacaatttcgccaggttatcactcaagtaggggcgaagcgcggcgatatcattgctgtggtgttgaatacggtagtcgtaaaattgttgagccacgctgtccgggccgccttccacacacgcgccgatacgcgggccattatctttgtaggcgggagtgacggtcgtacaggcgctaagcagaagcgcgcacgggatgagcaaagagagtttagaatagcgcatgatgatttccttataggcgatcgagcaaaaaccgatctacgataatcaattatatcctttcaatgatagcgtatcagcttgataatgcgtttgagatcgtgtgcttagctaacccgggagattcactatgcagttttcaacaaccccaacgctggaaggacaaagcatcgtggagtattgcggtgtggtaacgggcgaagccattttaggcgccaatattttccgcgattttttcgccggcattcgggatatcgtcggcggacgttccggcgcgtatgagaaagagctgcgtaaagcgcgtgaaatcgcttttcaggaacttggcgagcaggctaaagcgttgggtgccgatgcggtggtaggcatcgatattgattacgaaactgtcggcaaggatggcagtatgctaatggtcagcgtcagcggaacggcggtgaaaacgcgccgatgaaagcgctactgtggctggtgggtctcgcgttgctgttaacaggctgcgcgagcgaaaaaggaattatcgataaagagggatatcagcttgatacccgacatcgggcgcaggcggcctatccgcgcattaaagtcctggtgattcactatacggcggaaaactttgacgtttcgctggcgacgttaacgggtcgcaacgtcagttcgcattacctgattcccgcaaccccgccattatatggcggtaaaccgcgcatctggcaactggtgccggaacaggatcaggcctggcatgcgggcgtcagtttctggcgaggcgccacgcgtctcaatgatacgtctattggcattgagctggaaaatcgtggttggcgaatgtccggcggggtgaaatctttcgcgccgtttgaatccgcgcaaattcaggcattgattccgttagcgaaggatattatcgcgcgctataacatcaaaccgcagaatgtggtggcccatgcggatatcgcgccgcagcgtaaagacgatcccggcccgcgcttcccgtggcgcgagctggcggcgcaggggattggcgcctggcctgacgcccagcgtgtggcgttttatctggctggacgcgcgccgtatacgccagtcgataccgcaacggtgcttgcgttactctcgcgctatggctatgaagtcaaagccgatatgacggcacgcgagcagcagcgggtgattatggcgttccagatgcacttccgtccggcgcaatggaacggtatcgcagatgccgaaacgcaggcgattgccgaagcattactggagaagtacggccaggattaacgcggtaaatttccgtgatcgcgcagccaggcggcggtgcgctcaatgccttcgtccagcgtgacgatgggctggtagcccagctcgtcctgcgcgcgagtcgtatcgagcgtaaaatcaaaattcagttttgacacgccgtaatgcgttagcgggggctctttggcggattttttgccgaagcgctccatactgcgggcgatcatatccagcatcgggtaaggcacagagcgaatgcggcagtcgatagtcagttcatcaattaacttttgtacgatgctgcgtaaggtacggttttcgccgttagtgatgttataagcgcggccagaaggcagatgatcgcagcccggctggctggccagccacatggcgtggatcgcattttcatagtaggtcatatcgaccagcgcgctgcccccgtgcggtaataagacgctaccgtaatggtgcatcatatgcgccagacgtgggataaatactttatcgtgcgggccaaacaggctttgcggacgtaacaccgtaaaacgtgtttgcggattggcctgcgccaacagattaatcacctcttcgccggcggctttactgcgggcgaactcattggcaaaccgatgcgggcggaaatcttctttgatatcacggtgatggtggtaatcaaaatagagcgagggagaggagatatgaataaaattgcgcacgccccaggcgaccgcccattctcccagacggcgggtggcgcgaacattcgctagatcgaaagcctgttgggttccccagggcgaggtaaagctggagcagtgccacaacgtgtcgatcccggcaagcatcactttagcctgcgaggagaccagttcggttaaatccgcatggacgaattccgcgcccattttttcaagcagcttgcccatcgcttcattgcgacccgtcgctctgacgctgatgcctttattgcgcaaaaattcaaccgcgtttcgacctaagccgctggtggcgccggtaaccagtaccttcatatcaatccactgtgtttaataaaccgtcgtgcgcattcttccgtgaattacgtcggtatgcaatgggaaacacgaaagaatacagcaactttttctcatttttctgtgatttgttctgcaagtcgggcaatacgccttgccattccccggaaaataaacaggtgcgccgggatcatcagtagccagtaaatcaggcccggcattccgtgtggatgccaccaggcgcgcacgtcaatttcgcggtagcggcctttatcgtgcagcgtgaagctaagccgccccagacccggcgctttcatgccaaacaagagcgtgagctgtttttctggttcgacaatgatcactttccagctatctaccgtatcgccaggcttgagcaaggtatgcgacgggcggcctttcgccagtttatgccccaccagacggtccatcgcggcgcgcgtctgccacaaaatattgccgaaaaaatagccctctttgccacccagccgatttacgacctgccatagcgccgataggctggccggggtctgcgcggtaaagcccgcctgctttggaaaatagccgtattcgggacgccagcgggcgaaggccagcgcgtcgtagccccagtcgctggagttcaccagtttttcttcttctttcagcgtgcggcgaacggcgtcatcaaaggtgataagcgtttgggggatcaacttttttaacgcggcgtcatcggccagcaaatcgtgccttaatccctggattaacgcttttgcggtagttggcggcacggaggtaatgacgtttaaaaaccagaccgaaatccagcgggtcggaaaaggcaccgggatcagcggacgccgtttaccgctgacggccataaaacgttcaaactgctgctgataacttaatacctgcggcccggcggcttccagaatacgatgctcgcgagcagggtggtccagtaagccgaccaggtagtagagtaaattttccagagcgatgggcgtggtgcgcgaacgcacccagcgcggcggcgtgagtattggcaggttgtaaaccatgtcgcgcatgacttcgaaggcggcggagcctgcgccgacgatgatcccggcgcgtaattccgtcaccggtacgcctgcgtcgcgcagcgtgtcagccgtaagctggcgggcgcgcaggtgatcggattgctcatgcgccggtgcctgcagtgaactgaggaaaataagttgtttaaccggcgtctggcgcagcgcgtcgcgcacgttgagcgccgcctgacgctcatgggcgataaaatcgccgccttcgcccatgccgtgtaccagatagtaaacggtatcaatgtcgcgaagcagcgcgggtaaattttccggccagtgcagatcgaccttatgacaactgacgttggcgaggcgctgtttttccagacgttcgatgcgtcgcgccgccgctcgcacctgatgcccttgctgacttagcgcaaagaccaggtgctggccgatatagccgctggcgccgagaaccagaatgcgttgcgccacgttgctctccttagcgggctaaaaaggcgcgccagtgggcgacgacgtcggtaagctgttcgcgagagacatccagatgcgtcaccagacgcacaatcggcgcggcgttaatcaggatattccgttcccgcaaatagtcgccaagcgcggcggcctgtgcttcgccaacgcgaacaaacagcatattcgtttcgtggcgtatgacctccgcgcccgcttcccgaagctgctgcgccagccaggcggcgttatcatgatcctcttgcagacgcgccacgttatgcttcagcgcatacagtccggccgctgccagaatcccggcctgacgcattccgccgccgaccattttacgccagcgcgtcgcgcgtttaatgtaatcgcggttgccgaccagcagtgaaccgaccggcgttccgagaccttttgacaggcagatggtaaaagagtcgcaatactgcgtaatctcttttaactcacagccgtaggcaaccaccgcgttaaaaattcgggcgccgtcaacgtgcagcgccagtccacgttcgcgggtaaatgtccaggcgtctttcagatacgcgcgcggcagcactttcccgttatgcgtattttccagactgagcaagcgcgtgcgcgcgaagtggatgtcatccgctttaatcttcgccgccacgttctccagcggcagcgtaccgtccgcggcggcgtcgatgggctgcggctgaatgctgccgagcaccgccgcgccgccagcttcatagagataattatgcgcgccctgaccgacgatatactcttcgccgcgttcacaatggctaagcagcgcgaccagattggcctgggtgccggtgggtaaaaaaagcgccgcttctttaccggaaaggtcggcggcgtagcgctgaagggcgttaacagtagggtcatcgccgtatacgtcgtccccgaccggggcggtcatcatcgcctcgagcatggcgcggcccggtcgggtaacggtatcactgcgtaaatcaatcatggcacatccctggattttaaaaggtgatgtgcactgttttaccttagccagttcgttttcgccagttcgatcacttcatcgccgcggccgctaataatggcgcgtagcatgtacaggctaaagcctttcgcttgttccagtttgatctgcggcgggatcgccagctcttcttttgccacgaccacgtcaaccagtaccgggccgtcaatggaaaacgcgcgctgtagcgcaccgtccacgtctgcggctttttccacgcgaataccggtaatgccgcaggcttcggcgatacgcgcgaaattggtgtcgtgcagttcggtaccgtcggtaaggtagccgccggctttcatttccatcgccacaaagcccagcacgctgttattaaagacgacgatttttatcggcagcttcatctgtaccaccgagagaaaatcgcccatcagcatactgaagccgccatcaccgcacatcgcgataacctgacgacccggcgcggtagcctgagcgccgagcgcctgcggcatagcgttggccattgacccgtggttaaacgagcctagcaggcggcgcttgccgttcatttttagatagcgggccgcccagacggtcggcgtgccgacatcgcaggtaaaaatagcgtcgtcagcggcgaaatgactaatttgttgcgccagatattgtgggtggatggctttatcgctgagtttggctaagtcatcaagtcccttacgggcgtcccgatagtgctccagagctttatcgaggaatttacgattgcttttttcttccaccagcggcagcagggcgcgaagcgtggctttaatatcgcccactagcgccatgtcgactttgctgtgcgcgccaatactgcccgggttgatgtcaatctgaatgattttggcatcgctcggataaaaggcgcgataggggaactgggtgccgagcaggatcagcgtatcggcgttcatcatggtgtggaagccagaagagaagccaatcaggccggtcattcccacatcataagggttatcgtactcaacgtgctctttgccgcgcagggcatgaacgattggcgcttttagttttgccgccaacgcgaccaactcctcatgcgcgcccgcgcagccgctaccgcacatcaatgcgatattgctggagtagcgcagcagttgcgccagttttttcagctcttcctccgccggcgtgacgacggggagcggggcatggtaccaatgggtgacggcgttttcaggcgcgggtttcagcgccacgtcacccggcagtacgaccacggagacgccgcgatttaacaccgctttgcgcatagcgatggcgagtacctgcgggatctgctccgggctggaaaccaactcgcaatagtggctgcattcacggaacaactcctgcgggtgggtctcctggaaataaccgctgccgatttcactggacggaatatgggcggcgatcgccagaacagggacgtggttacggtggcaatcaaacaggccattgatcaggtgcaggttgcccggtccacatgaaccggcgcacactgccagctcgccggtaagctgcgcttgtgcgccggcggcgaaagcggcgacctcttcgtggcgggttggcatccattcaatggttcccatacgattaagactatcgctcaggccgttcagggagtcgccagtgacgccccagatttgttttacgccagcctgttccagcgttttggcgataaaagcagcaacggtttgtttcatggttctccatctccttaaatgtgataacggttacaagtttagttgaagatgacgatgacgtttttctttggcggagagaggggcgaaaggatgaagcgagtggtaaatcgcccggtggcgctgacgcttaccgggcctacgatggaacgtttaccgattatgcgagaacaagatcgccctgcggatggcaggagcaggccagtacgtaaccttcggcaatctccgcctcgctcagcgtcatggtgctactcaccgtatagtcgccggaaacgactttggttttacagcagccgcaaacacctgcccgacaggcagcggcaaccggtactttattactctccagcgcctccaacagcgtcgtaccgatcggggcataaaattcctgcgctggctgtagcttggtgaatttcaggccgctggttgccgtttccgccaccggcgtgaagaacttctctttaaagaagcgcgttacgccaagcgctttcactccctgttcgacgaaatccatatagggcgccgggccgcaggtcatcacggtgcgcgatgccaaatccggtacgctctgtaacaattccgtggtcagacggcccgcgataaaaccttccgtggcatgattttccgccactagcgtgaccggatactgtcgccactcgtcggcaaaaatcacatcatccggcgaacggacgttaaagatgacctgcacgtcggcctgcgggcggtatttcgccagccagcgacgcatcgacatgattggcgttacgccacaaccggcggcgagcagcagaaacttatcttctgttttatcgtcacaggtaaaatcgcccattgcatcagacagccagatgtaatcgccgcgcttgatgtcatgggtcaaccactgcgaacccgtgccatcgtcaatccgacgaacggtcagcgtaatatattcactgacgcccggcgtagacgaaagggtgtaggcgcgcagcgtttccgctgaattgcgcacgctcaccagcgcatactgcccggcgcggtaagggtagtagtcatggcataatagcgcaattgtccatacatccggcgtctcctgacggatgtgatgcacctgcattcgccagggacactgtgaggttggcatcgtcatcattgacctccttacgcgctcagcaattgcttcatgtcttcttcaacggtggtcacggaacgcagaccgaacttctcgttgaggatagccagcagatccggcgtgaagaagcccggcgcggtcggcccggtgacaatatttttcacgcctaatgacagcagcgtcagcagaatcacgatcgctttctgctcaaaccaggagagcaccagcgatagcggcagatcgttgacgccgcagcccagtttttccgccagcgtcaccgccaggataattgcggagtaagcatcgttacactgaccggcatcgaccagacgcggcagcccttcgatgtcgccgaactccagtttgttgaaacggtatttaccgcacgccagggtcaggatcaggcagtcatccggcacgctggtggcgaaatcggtaaagtagttacgctcgccgcgcgcgccgtcacagccgccgactaggaagatgtgacgcagtttttcacggctgaccagatcgatgagcgtatcggcagcgccgagcagggtctgacggccaaaaccgacggtgatgatatgcggaatttcgctatacgggaagcccgccatttgctgcgcctgggcaatgaccggcccgaagtcatcgccttcaagatggctaacgcccggccagccgacgatgctacgggtccagatacggtcgtcatagctgcccacggtcgggtcgataatgcagttagaagtcatcacgattgggccagggaagcgggcgaattcgacctgctgattctgccagccgctgccgtagttaccgaccagatgcttgaatttacgcagttccggatagccgtgtgcgggcagcatttcaccgtgagtgtagacgttaacgccggtgccttcggtctgctccagcaggttgtagagatctttcagatcgtgaccggagatcagaatgcacttgccttcagtcgctttgacgttgacctgagtcggcgtagggtgaccgtatttggtggtttcaccggcgtccagaatgctcatcactttgaagttcatctggccgatttccattgcgcactccagcagcgcgttcatgtcagcaggccaggtgcccagccaggccatgattttgtggtactgcgcgtaaatgtcgttgtcgtattgaccgagaacgtgcgcgtgctccatatacgccgccgcgcctttcagaccgtacaggcacagcagacgcaggccgaggatgttctcgccaatggcggctttgtctttattcggggtaaattccgccgcctgacgttgcaggtcgcccagatcgtcgctgaccagttgcagatcggccatcggattgtcgcaatgcgcattggcatccacgctcaggcactgcgctttcaacgcttcacgcaaggcaatcgcttcacgggcgtagccgacgatacgcggagagtcgaagttaacgttggtcagcgtggagaaaaacgcgcgcggcgcaaagttatcaacgtcgtgattaatgatgccatattcacgggccttcaccgcccaggcagacaaaccttgcaaagccgcaatcagcagatcctgcagatcggacgtttcagctgttttaccgcacattccctgcgcgtaggagcagccgtttccggctggtgtacggatggtttgttcacattgcacacaaaacatggtcacaccttttaaagttatatttaatatacatgtttaaggttatgcctgtgaacaaagggataaaagggatttctgccataatgtgcagggagattgatttagcgcaattttggcggcagatgcctaccgccaaagaggtatcaggccgagaagaacgccattaagagggggaccagcaggctgaggataaagccatgtacgatagccgccggaacaatctctacgccgccggagcgctgtaataccggcaacgtaaagtccattgaagtcgctccgcacaggcccaacgccgttgaacggctgcggcgaaccagaccgggaataagcataatggctaagagctcgcgggccagatcgttaaaaaatgccgcgctgccgataaccggtccaaacgactccgtcagcaaaataccggaaagagagtaccagccgaaacctgacgccatcgccagggcggtttttagcggtaagtccaggataaacgcattaatcacgccgcccagtaatgagcttgccacgacaacgaccgcgaccatcattccccggcggttaagcacaatttgctttaaggtcatgccgctatttcgtagctgaatccccaccaggaacaataaaaagatcagcgtatattcactggcttcggtggcgtgctgtaaaacagagagtccgctcaggccgatgacaaaccccaataccactacgccgcacagttgcagcgactccagcgccatggcaatacgtgaaggcagtttttcctgctgatgatggtgacgccacgggaggatacgttccagccacaataaggcggcgatattacacaataaaataatcgtaatactgacggcggaataatgaaaaatcgccaccagattactggcgaggttatccaaaaacgccaggcttattcccataaaaaagagaataaggtacacgatccagctcagtagccggttaataagttgtaatgcggctttatgtcgcagtggaatgagatagcccacaatcagtggaaccagaatgattaaaagtcctgaaaacatgaacagccgggcccttttttattgtttgaatagcgtacatgacactaccgaattccagactatcagtaaagcgacaccgtcagccgtacatttatcagacatttgccccaggcaaagggggggaatatcacgccaggcggacgcatttgccgttatactgcggtgaattttatggagtgatgacgtttttctggaggaagcatgattctcgaacgcgttgaaatagtaggatttcgcggtatcaaccgactgtcgttgatgctggagcaaaacaacgtgctgattggggaaaacgcctggggcaaatccagcctgctggatgcgctgactctgttattgtcgccagaactcgatctctaccattttgtccgtgaggatttctggtttccgcctggcgacataaaaggacgcgagcatcacctgcatattattctgacttttcgcgaaacgcagccagggcggcatcgggtacgtcgttatagagcgctggaagcatgctggtcgctttgcgaggatgattttcaccgtattttttatcggctagagggcgaatgcggcgccgatggcagcgtgatgacgctgcgcagttttctcaatagcgatgggcagccattactggtggaaaatattaacgatcaggtgcgccacctggttcgtctgatgccagtgctacgtttgcgcgatgcgcgctttatgcgacgtattcgcaacggtacggtgcccaatgtgccggatgttgaagtcacggcccgacagctggattttctggcgcgtgagctggcgacccggccgcaaaatttaaccgacgggcagattcgtcagggactgtccgcgatggtgcaactgcttgaacactatttctcagagcagggcgcaggacaggcgcgtcaccgactcatgcgccggcgttcgcaaaatgagcagcgtagctggcgctatctggatattattaatcggatgatcgacaaaccgggcagccggtcgcatcgggtgatcctgctggggcttttctccacgctgttacaggcgaaagggacgctgcggttacataaagacgcacgaccattactgctggtggaagatccggaaacccgtttacatcccattatgctttcagtcgcctggcaattgctcaatctgttaccgctacagcggatagcgacaaccaactcaggcgaactgctttcgctaacgccggtggaacatgtcgtacggctggtgcgcgaatcttcccgcgtcgccgcctggcgtctgggcccgggcgggttaagcgcggaagatggacggcgcatcgcctttcatatccgctttaatcgcgcgtcgtcgctgtttgcgcgttgctggctactggtggaaggcgagacggaaacctgggttattaatgagctggcgcgtcagtgtggacatcattttgatgcggagggcattaaagtcattgagtttgctcagtctggcctgaaaccgctggtgaagttcgcccgccgtatgggaatcgagtggcatgtcctggtggatggcgacgaagcggggaaaaaatatgccgcgacggtccgcagtctgcttaataacgatcgggaagaagaacgcgaacatctcacggcgttgcctgcgctggatatggaacattttatgtatcgtcagggctttgccgatgtttttcaccgggttgcgcaacttccgcctaatgtgccgatgaatacccggaaaattatcactaaagctatccaccgctcgtcaaagccggatttggcgattgaagtcgcgatggaagccgggcggcgcggaattgacgccgtgccgccgctgttcagaaagatgttctcgcgcgtggtttggctggcgcggggccgggcggattagcgtttgaatgtggccggaacctgttcgacgacgctatcgagtaatgcatagcggcggcgatactcggcccgttttttactggcgatctccgcttcgctttttcgggcgatcgccagcggcagcgtatagtaattccctttaattctttcaccgcctaacgattcccaaaacgcgtcatagtcggcatgcatttgcgtctttttatccatgtatcgccagctacgataaacgtgcgcatcgttactcacggctataatcttttctgcctgaaagacttgcgcaaactgacagagagcctccatcacgatgcgtttgggaaaaagaccatggcaggctttggtcgcctgctggataatttcgtgagggacgtcgtttgccgcgccctgtaatccgccgataaatagtgtgcgttgttggttaaagcgacacagggtaaatgtgatctctgccagaatacgtaactgtgcgtcgcgaacaacaatagtgctttcaccttctttatccagtgagaccagactgactaaatcaagttgaaacaactcgccggttttagtttcaaatttagcaagattcaggccatactgacttaaatagctaacttgttgttcccgcgataaaagttggcgcatctgttgataatgaaaacacagcgcatctaaggcgaaatcgcgtttaatatttacagccatataaggacgatgtagccgaataggcaaacgcggctgacgagcaagtaacgtatttaactccggccattgggtgagattggtcagtaattggctggtcgcacgcggcatgactaatgagcggattaaaaacttgcgacgaaagctggctttacgccagaattttcctggctgtaattgcccgcgcgtcagacgaataaataattgtaaaggagagatgtaatctgaagtgtaccaggtattatctgtaagctgtgtcatgatcgtaatccgcgacataagattgtcgagattgaaccacaggaaacattaaccaatcgtcaatacagccggcgctatctttattgcgtcaggtttgtttagatacggtttactttctggttaaaattttgccgtcagggtttctatgcgtgctaagggaaagaaatttaaaaagcgttatctggtcattattttaattcttttagtgggggggatggctggctggcgaatgataaatgccccgctgccaacttatcagacattaatcgtgcggccaggcgatcttgaacagagtgtactggcgactggaaaactggacgcgttgcgtaaagtggatgtcggcgcgcaggtgagcggccagttgaaaacgctgctggtctccattggcgataacgttaaaaaagatcagctactcggcgtgattgacccagatcaggcggagaaccagataaaagaggtcgaggccaccctgatggagctgaacgcggagcgtcagcaggcagccgctgagttaaagctggcgcgggttacgctggcgcgccagcagcagttagctaagactcaggcggtatcgcaacaggatctggataccgcggcgacggagatggcggttaaacaggcgcgtattggcaccatagatgcccagatcaaacgtaatcgggcctcgttggacaccgcgaaaaccaacctggaatatacccgtattgtcgcccccatggcgggggaagtgacgcaaatcactaccctgcaaggacaaacggtgattgcagctcagcaggcgcccaatattctgacgctggcggatatgagcaccatgctggtaaaagcgcaggtctcggaagcggacgtgatccatcttcgggcggggcagaaagcatggttcaccattgcaggcgatccgcaaacgcgctatgaaggcgttttaaaagatattctgccgacgccggaaaagatcaacgacgctattttttattacgcccggtttgaagtgccgaatcccaaaagaatcttgcgtcttgatatgaccgcacaggtttatattcaactcatggatgtcaaaaatgtgctgattattcctctcgccgcgcttggcgaaccggtgggcggcaatcgttataaagtggcgctgttgcgtaacggcgaaaaacgtgagcgcgaagtggtcattggcgagcgtaacgatacagacgtggaagtggttaaaggtctggaagcgggcgatgaggtgatcatcggcgaaagcaggccaggagcgacgccatgacggcattgcttgaactgtgcaatgtgagtcgtagctacccctccggagaagagcaggtggcggtgttgaaagatatctccctgcaaatccacgccggggagatggtggcgatcgtcggcgtttccggttctggaaaatcaacgctgatgaatatcctcgggtgcctggataaaccgaccagcggcacttatcgggtggcggggcgggacgtctcgacgctggacccggacgcgctggcgcagctgcggcgtgagcattttggctttatctttcagcgctaccatctgttgtcgcatttaacggcagcgcaaaatgttgaaatccccgccgtctacgccggcattgaacgcaaaaaacgccaggcgcgcgccagagagttgcttttgcggctgggattaagcgatcgcgtcgattacccgccttcacagctttctggcggacagcagcagcgtgtcagtattgcccgcgctctgatgaacggcggacaggtgattctggcagatgagccgaccggcgcgctggatagccattccggcgaagaggtgatggcgattttgcgccaactgcgcgatcgcggacatacggtgatcattgtgacgcacgatccgctgattgccgcccaggcggagcggattattgaaattcacgatggcaagattgtccataatccgcccgcgcaggaaaagaaacgcgaacagggcgttgacgctgccgtagttaatacggctcccggctggcggcaatttgccagcagctttcgcgaagcgctgtcaatggcgtggttagcgatggccgctaacaaaatgcgtactttactgaccatgctgggaattattatcggtattgcgtcggtggtgtcgattgtggtggtcggcgacgccgcaaaacagatggtactggcggatatccgcgctatgggcactaacacgattgatattcatccaggcaaagattttggcgacgacaacccgcagtatcgacaggcgctgaaatatgacgatctggtggctattcagaaacagccgtgggttaactctgcgacgcccagcgtttcaaagagcttacgtcttcgctatggcaatattgatattgccgtaaatgctaatggcgtcagtggcgattattttaacgtttacggcatgtcctttagggaggggaacaccttcaatgctgtacagcaacaggatcgcgcgcaggtggtggtgctggatgccaacacgcgacgccagctatttccaaataaagcgaatgtcgtaggggaagtggtgctggcgggtaatatgccggttattgttattggcgtggcggaagagaaaccgtccatgtacggcaatagcaatctgttgcaagtttggttgccctatagcacgatgtcagatcgcataatgggtcagtcatggcttaactcgatcaccgttcgtgtgaaagatggcgttgatagcgatcaggctgaacagcagcttactcgcctgctcaccttacgccacggtaaaaaagacttcttcacctggaatatggacagcgtcctgaaaacggctgaaaaaaccacctatactcttcagttatttctgacgctggtggctgtcatttcgctggttgtcggcggcatcggcgttatgaatattatgctggtttccgtcaccgagcgaacgcgtgaaatcggcatccgtatggcggtaggcgcgcgcgccagcgatgtgctacagcagtttcttattgaagcggtgctggtttgcctggttggtggagcgctggggattagcttgtcgatgttcatcgcatttatgctacagcttttcctgcccggctgggagatcggtttttcactgactgcgctggcgagcgcgtttttatgttcgacgtttaccgggatactgtttggctggctaccggcgagaaacgcggcgcgactggacccggtggatgcgctggcaagggagtaatcttgctgacgtcatttgtcggcctgataagatgcaacagtgtcgccaccaggcactggcgttaaataaaaatgccagccgatcgggctggcattttgcctcctggatgtacacaatgagacagaggagctatgcaacggcctctgcttcgatgggcacgatgacgctggcgtgattgccttttggcccctggtggacatcaaaccggacagactgtccggctttaagcgttctgtaaccatccatttgaatggtggaataatgggcgaaaatatcctcgccgccgccttcagggcagatgaaaccaaaccctttggcattgttgaaccactttacagtacccgtttccatgcttcgacatccttcgtaaatcttatataagtaagatggaatgaaccggtgacggagtgggggctgttcaaaacctcaccaactctcgacattacaatttagagaaatcaggcgaggcgtcaagcatcaggcaggggggatcgggtaaaaatgaatcaaaaatttgaagcagttaacgctattgccgggaatgtgacagatgtcgcggatggtactgatagatgttagttatctatcaattgaggtagattgattgtgtgcatagactctggtcagcggcagattttcctgccgacaactgtaaccgataatgacgactgacaatgggtaagacgaacgattggctggattttgaccagttggtggaagatagcgtgcgcgacgcgctaaaaccgccatctatgtataaagtgatattagtcaatgatgactacactccgatggagtttgttattgacgtgttacaaaaattcttttcttatgatgtagaacgtgcaacgcaattgatgcttgcagttcactatcaaggcaaagccatctgcggcgtgtttaccgccgaggtggcggaaaccaaagtggcgatggtgaacaagtatgcaagggagaacgagcatccgttgctgtgtacgctggaaaaagcctgaatgcaggtataaaaattgggggaggtgcctatgctcaatcaagaactggaactcagtttaaacatggctttcgccagagcgcgcgagcaccgtcatgagtttatgaccgtcgagcatctgttgctggcgctgctcagcaacccatcggctcgcgaagcgctggaagcatgctccgtggatctggtggcgctccgtcaggaactcgaagccttcattgaacaaaccacacccgtactgcctgccagtgaagaagagcgtgatacgcagccgacgttaagtttccagcgtgtcctgcaacgtgccgtcttccacgttcagtcttccgggcgtagtgaagtgactggcgcgaatgtgctggtggctatctttagcgaacaggaatcacaggcggcttatctgctgcgcaagcatgaagtgagccgtctggatatcgtgaactttatttctcacgggacgcgaaaagacgaaccgagccaatcttccgatctcggcaatcagccaactggcgacgaacaagctggcggggaggaacgtatggaaaacttcacgacgaatcttaaccaacttgctcgcgtgggcggcatcgatccgctgattggtcgtgaaaaagaactggaacgcgcgatccaggtcttgtgtcgtcgccgtaaaaataacccgttgctggtaggggaatccggcgtcggcaaaacggcgattgccgaagggctggcctggcgtatcgtgcagggcgatgtgccggaagtgatggccgattgcaccatttactcgctggatatcggttcgctgctggcgggcaccaaataccgcggcgattttgaaaaacggtttaaggcgttgctgaaacagcttgagcaggataccaacagcatcctgtttatcgatgaaatccataccattatcggcgctggcgcggcgtcgggcggacaggtggatgcggcaaatctgattaaaccgctgctttccagcggtaagatccgggtgatcggctcaacgacctatcaggaattcagcaatatttttgagaaagaccgggcattagcgcgccgtttccagaaaattgatattaccgagccttcggtggaagagacggtgcaaattatcaacggcttgaaacctaagtacgaagcgcaccacgacgtgcgttataccgcgaaagcggtgcgtgcggcggtcgagctggcggtaaaatatatcaatgaccgccatctgccggataaagccattgacgtgattgacgaagcgggcgctcgggcgcgtctgatgccggtgagcaaacgtaagaaaacggtcaacgtggcggatattgagtccgtagtggcgcgaattgcgcgaattcctgaaaagagcgtctcgcagagcgatcgcgatacgctgaagaacctgggcgatcgtctgaaaatgctggtcttcggccaggataacgcgattgaggcgctgaccgaagctattaagatgagtcgtgcgggtctgggccatgagcataaacctgtcggctcattcttgttcgccgggccaactggcgtagggaaaactgaagttacggtacagctttcaaaagcgctgggtattgagctgttgcgcttcgatatgtctgaatatatggagcgtcatacggtgagccgtttgatcggcgcacctccgggatacgtcggtttcgaccagggcgggctgctgacggatgcggtgattaagcatcctcatgcggtgctgttgctggatgagatcgaaaaagcgcacccggatgtctttaacctgctgctgcaggtgatggataacggtacgctgaccgataacaacggccgcaaggcggatttccgcaacgtggtgctggtgatgaccaccaacgctggcgtgcgagaaaccgaacgtaaatctattggtcttattcatcaggacaacagtaccgatgcgatgggcgagatcaagaaagtgtttacgccggagttccgtaaccgtctcgacaacattatttggttcgatcatctgtctggcgaggtgattcatcaggttgtcgataagtttatcgtcgagttgcaggctcagttggatcagaaaggcgtctctctggaagtcagtcaggaagcgcgcgactggctggcggaaaagggctatgaccgggcgatgggcgcacgaccaatggcgcgtgtgattcaggataacctgaaaaaaccgctggccaatgagttgttgtttggatcgctggttgacggcggacaggtcaccgtcgcgctggataaagagaaaaatgcgttgacgtatgacttccagagtgcgcaaaagcacaagccggaagccgcgcactaatcttcgtttcactgtcgtacaaaccgggccttagcgcccggtttttttgtctatggaaaacccccagctaggctgggggttccggaaagctttcagctttaagccagttattaaaaccccttttgatttgttaaaacatcttgcggtctggcaactgcaaaagttcaacaagaaatcaaaagggggtcccaatgggggacgaaaagagcttagcgcacacccgatggaactgtaaatatcacatagttttcgcgcccaaataccgaagacaagcgttctatggagagaagcgtagggcagtaggcagcatattaagaaaattgtgtgaatggaaaaacgtacgaattctggaagcagaatgttgtgcagatcatattcacatgcttctggagatcccgccgaagatgagtgtgtcgagtttcatgggatatctgaagggtaaaagtagtctgatgctttacgagcagtttggggatctaaaattcaaatacaggaacagggagttctggtgcagagggtactatgtcgatacggtgggtaagaacacggcgaagatacaggactacataaagcaccagcttgaagaggataaaatgggtgagcaattatcgatcccgtatccgggcagcccgtttacgggccgtaagtaacgaagtttgatgcaaatgtcagatcgtatgcgcctgttagggcgcggctggtaagagagccttataggcgcatctgaaaaacctccggctatgccggaggatatttatttacgccggataatagttagcctgatagcgttgtgctcgcggtaggcggataaggcgcttgtaaattgcgtcatcatccggtaatcgacgggtcaaatgcgaaaaaaagtccgtactttcgtacgaactctttcttgaatatggcggtgaggggggattgactcgctgcgctcgcccttcgggcagtctcctcgcaggctcgtcgtttgtccaactggctgcgccgctactcagcccatccctgggcctcgccccttcggggccagagcaagctctgttcaaaaacgctcccggcgtttttgtgtcgaaccccggtcgggtgttctcatcccccctgtagggtggctttattgactagtcctgatataggttgacagttttttgtctgtaaaacgcctgatgaacatcatcgggcgttttgtatttcagggccaggtgtggccgttcatggttataaattgccacggactcttttactatttcccgcgcttgctccaggtctgcaggacgcgagagtaaaaactcatttttcagtatcccgtttattctctcagccagcgcattctggtagcagtcgtaaccatcggtcattgaacaggttattccgtttcgctcatgaactgactgataaagtaccgaacagtattgcagtcctctgtcagagtgatgtaccagcggacctgtcgtttttctccgcctcagagcctgcctgaacgcctttaccacattttctgtctgcaggttttccccgacatggtaacccacgatttttctggagcaggcatcggtgaccagactcagacaggccgtgccgctgcgtagtggaaggtaagtaatatcggcgacccagacctgctctggctcaagggcggtaacctgttcagggccgggtttcagcagattaggatgccggtaaaagcgatgatggctgttggtggttttgtgatatgcccgtttcacgggtaccaggagccggtattcacccagcagattaaacagacggtcccgtccgatattcagcgttttatcggcctgcatgttcagcagatagtgcagtttacgcgtaccgattcgcggctggcggcaccgggtacgggcaacaaaatcaagaacctgagcatgatgctcctgccgtttattacatcttgtattgtactggtaccacgcctgtctgctgtgccccaggaactgacatgcacgcgtaactgttattttgggggcctgactttgcgtgaggacttgccgggccgcttttttacaacacttaccccgtaatcatttttcaggacgttgataacggactcaaaaaactcagctttctggtttgccagctcaagctgttcttcaagttccctgattctttgctcgggtgtcagcgggatagttgtctgagccacaggcagtttcctcttcaccaggtcaggaagtccgggtctccagtcaagccggccatatttacgcagccagacaagtacggtggagcgcccctgaatgccatatcgctgctgggcctgtttataggtcatctcgcctttttcgacctgctcaacgacggctattttaaaggatagaggataatcgcgttgggtgcgtttgaactcagtcatcatcacgttctccggatttaagtctggaacgtgtcaacgctattcaggacgggtcatatgtgaaaaaaaagcccgtactttcgtacgagctctttcttgaatatggcggtgagggggggattcgaacccccgatacgttgccgtatacacactttccaggcgtgctccttcagccactcggacacctcaccatattgtattgctgcctgaccacttggggggcaacggggcgctactatagggagttgcgctaaaacggtcaagcagaatttacatattcactgtcgtttgctcatgcaatagacataatccccgcccaaactggcgcggggaggcaaattaacgctgtgaatccaacatttcgttgtttttcaccacatcctgcgctttgctgtagctttctatcagcagttgataggccgggaatacctgagtataaacgtcggcccacgcggcggcgtcttcacggttccaggtgccttgcagctcagaggcgactgcggcagtatccatcggtacgacgccagcctgtacgatacgcgccagggtgatctcctgcgccatcttactgtaggtaccggatgcgtcgatcacggcaaataccttataaccttccgctaccgcgctaatggccgggaatgccatgcacacgctggtaatcgtcccggcaatgatcagcgtcttacgacccgtcgcttttaccgccttaacgaaatcttcgttatcccaggcgttaatttcacctttgcgcgcaatgtactgcgcatgtggcgcattagcgtggatctccgggatcagagggccgttcggaccttgcggtacggatgccgtggtaatgaccggcattttcgctaacgtcgccatcttcgccaacgccgcggcgcgagcgcgtaattccggcattggcatatcgcctacggtctggaaaagaccgctttgatgatcgattaaaagcatcacggaatcgttaacatcaattaccgggcgcaaaccattaaaattagcaggacttgacatcgtattctccttcatgttttcagatttggccaaaacggccggagttgaaatcgcgaactgcttctgcgatctcttgtttcgtgttcataacaaatgggccgtaacccacaatcggttcattcagtggctcgcctgataacagcaatacgctggcgtcgctgctggcctcaaggtgcagcgttttcccttgctggctcaacaccaccagttgcgcttcgttgaccggcgtcgtgccgttcaccgtgatattgcctttcagtaccaccagcgcggtgctccatccttccggctgtgccaatgtaagctggcgattgcgttgcaggcgcatatcccagacattgagcggcgagaaagtgtgcgccgggccttttgtctcttcataacgccctgcgatgacccgcacgactccggcgttatccggcaacgtaacggtcgggataacatcgtgggtaatgctttgataacccggggtggtcattttgtccttcatgggaaggttaacccacaactgcaccatttccagttcgccgccccgacgggtaaacgcgtcggaatggaactcttcatgcaaaatgcctgcgcctgcggtcatccactgaacgtcgcccgggccgataacgccgccgcgaccggtagagtcccgatgctcgacttcgccactataaacaatcgtcacggtctcgaaaccgcggtgtggatgctccccaacgccgcgtttttcattacccggcgtaaaggtgtgcggcccggcataatccagcagcaggaagggactcaactgctgcgcatgtgactgataagaaaagagtgaacgaaccggaaatccatcgccaacccagtgcgggcgaggtgcggtatagacgcctgtaatctgtttcatggtgttctcctcagtggcgttgtcttgatgtgaataagcttatattcatgacaaaaggttcggtagtggctaaaatggctcataccgttccattaataggacaatgtaatgataaaaacggatctcaatgattttgcgtggtttgtgcatgtggtcgaagagggtgggtttgccgcggcggggcgtgcgcttgatgaaccaaaatcaaaactgagccggcgtattgcgcaactggaggaacggctgggcgtgcgattgattcagcgaaccacccggcagtttaacgttaccgaagtggggcaaacattctatgagcactgtaaagcgatgctggtggaagctcaggcggcgcaggatgccattgccgcattgcaggtagagcctcgcggtatcgtgaagctgacctgcccggtgacgctgctgcatgtacacatcggcccaatgctggcgaaatttatggcgcgttatcctgatgtttcgctacagcttgaagcaaccaatcgtcgggtggacgtcgtaggggagggggtggatgtggcgattcgcgtcaggccgcgcccgtttgaggatagcgacctggtgatgcgcgtcctggctgacagagggcatcgcttgtttgccagcccggatcttatcgcacggatgggaatcccttccgcgccggcggagttgagccattggcctgggctaagtcttgcatccggcaagcatatccaccgctgggaactttacggcccgcagggcgcgcgtgcggaagtccattttaccccgcgtatgattaccaccgacatgttggcgctacgcgaggcggcgatggcgggcgtggggcttgtgcagctacctgtcttaatggtgaaagaacaactggccgccggtgaactggtcgcggtgctggaagagtgggagccccggcgggaggttattcatgctgtgttcccatcccggcgaggattattaccttccgtacgtgcgttggtcgattttttgacggaagagtatgcgcgaatggtggaagagtaacctgctcgtcattcatcaacttaatggacgcaaaaaaggccggttaaaccgaccttttatccagccgcccttcagggcgtgaggagacaattagcgactacggaagacaatgcggcctttgctcaggtcgtacggggtcagctcaacggtcactttgtcgcccgtcaggatgcggatgtagttcttacgcattttaccggagatgtgtgcagtaaccacgtgaccgttttctaactctacgcggaacatggtattaggtaacgtttcgagaacggtaccttgcatttcaatattgtcttctttggccatctaatcctctggggtatcactaccataatttgaaccggcaagataatgccgaacttcttttgataagtaaagatttgtgcgtttaaaacacagcaaaccaggtttagcacatgattccgcgacacacgacaacgccgcgttatacaccttttccctgatactaccgcctgatgtatcgacataagcgcaacatataagggaacggtgaaataaacgatgggcgttacctgacaacgggctgcgggataatgagctaaaccaattctgcggcagcaattataacaccccaataaaaaatgtgccgaaaacattcacttccggggcaaaaataatgtccgcggcacccaaaaacgggaggccagcggctgttggcgtaaggccgcgaggtgatcgaggtagtcacgacgtggaatttcaatggcgccgagcgaggcggtatgactattaagtacctgacaatcaataagtttaccgccgtgacgggtaaattcagcgcaaaaaaccagcagtgcggttttagaggcattctcctggcggctaaacatcgattcgccgcaaaacagcgccccctgcgagacgccatacatcccgccgaccagttcccgatcgcgccacacttcaatggagtgcgcgtggcccaattcatgtaatcggcgataggcttcctcaataccacgcgttatccaggtgccttcgtcacggtgattggcgcatccatcaatgacccgatcgaaagcgtaattgagcgtcacgcggtaaggggatgcgttgtgaaagcgcttcatactgcgactgaggtgaaacttttcaggccacagcacggcgcgaggatcgggcgaccaccacagaatcgggtcgcccggcgaaaaccacggaaaaatcccgtgctggtaggccattaacaaccgggcagggctgagatcgccgcccagcgccagtaaaccgttaggctcgcgtaaagcgccttccggcgaagggaaggcgatagaatgtcgggaaagctgaaccagacgcatgacggcgaaactccagtacgcaagtcggatcgttcaataatagcttacagacgttgtttaaactgataatagcgcccttgtccggctaacaattctgcatgagtgcctcgctcaatgatgtgcccgtcgtccattacgatgatttgatcaaaacgggccaggccgcgcaaacggtgagtcaccatcaggacggttttctcgcgcatcacatcggcaagtaattccagcatttcgctctcggtggtcgcatccagcccctcagtaggctcatccaacagcatcaacggggcatcgtgcaacagcgcgcgggcgatggccagacgacgaagttcgccgccggatagcagacgaccgccttcgccgagccagctattaagcccactatcttcgagcagattttcgaggccgacgcgacgcagcatgtcggaaagggcttcgtcgctggcattgggcgccgccagtaataaattatcacgcagcgtggcgctgaacaggtggacacgctgcggcaccacgctgatagtccggcgtaaggcggattcgctcagcgaggatagcggaagatcgttgagcagaatttcgccttgttgcgggtcccaggcgcgggtgagtagctgcaacagcgttgattttccgcagccggtacgccccagaatagcgacatgctcgccaggattagcctgtaatgagagggcattgagcgcattaatcggctggtcgggataacgaaacgaaacgtcccgcagggtgagtgtgaccttttccggcgcgggagtttctgcttgcggaaaggtcacctccggtttttgctccgttaattcagtgatacgaagcgcagaggcgataacctgccccagatgctggaatgcgccggtaacgggcgcaagcgcctcgaaagccgccagcgcgcagaagacaaacagcgcgatgagcgcgccgggctgcgtattgccgccaacgccgccggaggccatccacaacattaacatcaccgccagcgcaccaatcagcagcattaacgcctgcgataaggcggtgagttcagactgtcggcgttgggcctcatgccattgtaattcggtggcttccatttgcgcccgatagcgtttgctggcgccaaaaatggtgagttccgcctggccctgtaaccatgacgtgagctgctggcgatactgaccgcgtagatgcgtcagattttggccggtatttttgccggcgcgataaaacaccggcggcataataaacagcgtcaacagcataatgccgcccagcgtgatcgccagcgtcacgtcgagaacgctaagccccagggtgacaatcataatcactacaaaagcgccgaccagcggggagatgacgcgcaaatagagatggtccagcgtgtcgacgtcggcaacgatgcggttcagcagttcaccttgctgataacgcgccagactcgcgggggagagtggtagaagtttgctaaaggtataaatacgcagatgttgcagtacgcggaacgtggcgtcatgacttaccagacgttcaaaataacgaccagcggtacgggtaatggccgcgccgcgcacgccggctgccgggagcatatagttaaaactgtaaattcccgcgaagcctgcgatagcggacgcggacaggaaccagccggaaagcgtcagcagcccgatactggcaagcagtgtcaggattgccagcgcaattcccagcgttagcatccatttatggcgtttataaagcgtcagataagggagtagcgcgcgcatttaaatatcctcctgacggtgagccaataacgtcgcaaaagcgccgttggcggcgctgagttcagcataactgccttgttcgacaatcgcgccatcttgcataacccagatagcgtcccagtcggcgagatcttccaactgatgcgtcaccattaatgtggtctggcgttttgacgccgcttttaacgcctgcatgacgcgttgctcgctgtgagcgtccaggcttgccgccggttcatccagcagtagcagttgacagggattaagtagcgcacgggcgaccgctacacgctgtgcctggccgacggaaagtctgctggcatgattgccgagcggggtgtctactccctgcggcagcagcgataaaaactcgcttacccatgcggcgtcaagcgcggcataaagttcctgctcgctggcgtccgggcgcgccagtaatacattttcgcgtagcgtcgctgcaggtaattgcgggttttgcccaacccaggagagatgctggcgccaggattccggcgagagatcgcgaagctcgacaccgttaatacgcaaagatccctgataggagagaaaaccggataatacattcaacagagagcttttaccggaaccgctgcgtcctaccaggacggcgcgttctcctgccgctaatgagaaattcagcggcccggcaagcgttttgccttctggcgaggtgataataagattgactgcgtcaatggttacaggttcgttttccgccagctcaacttcgccgcgcgccgggtgggcaaggggtgtttccagaaacgtcttcagactatccgccgcgccaaccgcctgcgccttagcatggtaaaacgtgccgaggtcgcgtaacggctggaaaaactccggcgcgaggatcaaggcgaggaacccggcggcgagcgtcacgccggtaccgtaatgaccaaagttcagttcgcccaggtaagagaagccaaaataaacggcgaccagcgcaatagaaagcgaggtgaaaaattccagcacgccggaagataaaaaggcgaggcgcagtacttccatcgtgcgctgacgaaaatcctgcgatgctgcgcgaatgctttcggtttccgcttctccacgaccgaaaattcgcagcgtttccatcccgcgcagacggtcaagaaaatggccgcttagccgggcaagcgccaggaaattgcggcggttggcgtcagccgcgcccatccccaccattgccataaataggggaatgagcggggcggtgcccagcagaatcagcgccgccgcccaatttgacgggaaaatcgccgccacgattaagagcggtacgcaaacggcaagcgccatttgcggcagatagcgcgcataatagtcatgcatatcgtcaatctgttccaataccagcgtcgcccagctaccggcgggcttgccctgaatccaggctgggccggcttgctgcagacgatccaacacctgacggcggatctcaaagcgaatatgttgtccggcatgaaaaccgacgcgctcgcgcaaccacaccacccaggcgcggaggacaaagaccagtatcagcaggataaaagggagcaacagcgcttcccgtggaatgttctccatgatcatatgttgcaggatacgcgccatgatccaggcctgagcgacaattaatacgccactcatgaaccccaacaggcgggaaatattcaaccaccgttgggagattacgctttgctgttttaaccagcgggtcagctctttttgacgggttttattcattgcacgcttagcaggtgagttattggaatttcaggcagggcaatgttacaacgacgcaaaaataaaggcgacttatagtcgccttttttacttttgttactgatttgtaaaaactatttgctcgcgtcggccagaccatcgagatagcgttcagcatccagcgccgccatacagcccgtacctgcagaggtgatcgcctgacggtaaatatgatccatgacgtcacccgccgcgaatacgccagggatgctggtttgtgtggcgttgccatgggtgccggactgaactttgatataaccattttccagctcaagctggccttcgaagagcgccgtgtttgggctatgaccgatggctacgaaaagtccggcgatgtccagcgtctcgatattatcgctctgctgcgtgtcgcgaagacgcagaccggtgacgcccatctgatcgccggtcacttcttccagcgtccggttggtgtgcagaatgatattgccattttcgactttatccatcaggcgcttaatgaggattttttcagcgcggaaaccgtcacggcgatggataaggtgcacttccgaagcgatgttggacagataaagcgcttcttcaaccgcggtgttgccgccgccgatcaccgctactttctgattgcggtagaagaaaccgtcgcaggttgcgcaggcggaaacgccgcgccctttaaaggcttcttccgatggcagccccagatagcgcgcggaagcgccggtcgcaatgatcaacgcatcacaagtgtactctgcgctgtcacctgtcagacggaacggacgattttgcagatccacgttgttgatgtgatcaaaaattatctcggtttcaaattttgccgcatgttcatgcatgcgttccatcagcagcgggccggtcaaatcgtttggatcgccgggccagttttccacttccgtcgtggtagtcagttgaccgcctttttccataccggtaataagtaccggctgtaaatttgcgcgcgcggcatacaccgccgcggtatatcccgccggtcctgagcccagaataagcagcttactgtgtttggtcgtgcccatgagatccccatagttgttggcagacaatgagcagaattgtagggaatttacagacgtaaaaaaagagcataacgattttgttaacaatatgtgtaatagcatgaaccgatgaacggccgcgacagcgacgttatcatcacaaactttaattaaaatcggtaacttataaggtgacgaaatgacagtttaccgccctctctaatgaataactggcatgttgtactaaaaatcgatgttttgctttgacaatcacctgctgttttgcgaaaacattcgaggaagaaaaaactgtgttatgtatgtgctgcataatcatgcatgtaaataccatgtttaccgggctagtgaaatctacgcatggcgtggacagacgccattcgtgatgtcgatagctgccgcgaggcaacggtcttctcaccatagaccaggcattgcgcgccgttaatccctctgggtttcggtctatcgtgatgggcagcgactctgaacagtgatgtgagtagagtcaggcaggagtagggaaggaatacagagagacaataataatggtagatagcaagaagcgccctggcaaagatctcgaccgtatcgatcgtaacattcttaatgaactgcaaaaggatgggcgtatttccaacgtcgagctttctaaacgagtaggactttcgccgacaccttgccttgagcgtgtgcgtcggctggagcgacaggggtttatccagggctatacggcgctgttgaacccgcattatctggatgcgtcacttctggtattcgttgagattaccttaaatcgcggcgcgccggatgtgtttgaacagtttaatgccgccgtgcaaaagcttgaagagattcaggagtgtcatttggtttccggcgatttcgactacctgttgaaaacccgtgtaccggatatgtcagcgtatcgaaaactattgggagagacgttgctgcgcttgccaggtgtgaacgacacccgaacttacgtagtgatggaagaggtaaaacagagtaatcgtctggttattaagacacgctaacacggaacaggtgcaaaatcgctgtagtttgattacactcctgttaatccatacagcaacagtgccggggcaacccggtgctgttgtccgttttagcatcgggcgggaaaagcctggaacctggagagccttttttgagccaggaatatactgaagacaaagacgtcacattgacgaagttaagcagcgggcgccgacttttggaagcgttgttgatacttattgccctttttgccgtctggttgatggcggccttgttgagctttaacccttcggaccccagttggtcgcaaaccgcctggcatgaacccatccataatttaggcggcgcgccgggcgcgtggctggccgatacactgttctttatttttggcgtaatggcctacaccatccctgtcattattgtcggcgggtgttggtttgcgtggcgtcatcagtctacggatgattacatcgactattttgctgtgtcgctacgccttatcggcgtgctggcgctgattctcacttcctgcggtctggcggccattaatgccgacgatatctggtatttcgcctccggcggcgtaattggcagcctgttaagcaccacgctgcagccgttgttgcatagtagcggcggaacgataatgcttctctgtatttgggctgccgggctgacgctctttaccggctggtcctgggtcagtatcgccgaaaaattaggcggctggctgcttaatatactgaccttcgccagcaaccgtacccggcgtgatgatacgtgggttgacgacgaagagtatgatgacgaatacgatgaagaaaccgacggcgtgcagcgtgaatctcgccgggcgcgtattttgcgcggcgcgttggcgcgtcgtaagcgactggctgaaaaattcagcaatccacggggccgtcagaccgatgccgcgctcttttccggcaaacggatggatgatgacgaggacattcagtatagcgcgcgcggcgtcgctgccgatcccgacgacgttctgttttcgggcaaccgtgcgacgcagccggaatatgatgaatatgatccgctgttaaacggccattctgtcaccgaaccggtcgccgccgctgcggctgcaactgccgtcacccagacgtgggcagcgtccgccgatcccataatgcaaacgccgcccatgcctggggctgagccggttgtcgcgcaaccgaccgtggagtggcagcccgtaccggggccgcaaaccggcgaaccggttatcgcgcctgcgccggaggggtatcagccgcatccgcaatatgctcaaccgcaggaggcgcaaagtgcgccgtggcagcaacctgtgcctgtcgcttccgcgccgcaatacgccgcgacgccagcgaccgcagcagaatatgactctcttgcgccgcaggaaacacagccgcaatggcagccggagccgacccatcagccgacgccggtttatcagccggagccgatagcggctgaaccttctcacatgccgccgccggttatcgaacagccggttgccaccgagcctgaacctgacacagaagagaccagacctgcccgtcctccgctttactattttgaagaggtggaagagaaacgcgcccgtgagcgcgaacaactggcggcatggtatcaaccgattccggagccggtaaaagagaacgtgccggtcaaacctacggtatctgtcgcgccgtccataccgccagtggaagcggtagccgccgccgcgtcgcttgacgcaggtattaagagtggcgccctggcagcaggcgccgcggccgctgcgcctgcatttagtctggctaccggcggcgcgccgcgtccgcaggtgaaagaggggattggtccgcaactgccgcgtccgaaccgcgttcgcgtgccgacccgacgggaactggcatcgtacggtattaagctgccgtcacagaggattgcagaagaaaaagcccgcgaggcggagcgcaatcagtacgagacgggcgcgcagctaaccgatgaagaaatagatgcaatgcatcaggacgagttagcccgtcagtttgcgcagtcgcagcagcatcgttatggtgagacgtatcagcatgatacgcaacaggcagaagatgacgataccgctgcggaagctgaattagcccgccagtttgccgcttcgcaacagcagcgctattccggcgagcaacccgctggcgcgcagccgttctcactggacgatctggatttctcgccaatgaaagtattggttgatgaaggtccgcacgaaccgctgttcacgccgggtgtcatgcccgagtcaacgcctgttcagcaaccggtagcgccgcagcctcagccacagtaccagcagccgcaacagccggtagcgccgcaaccgcagtatcagcagccgcagcagccggtagcgccgcagccgcagtatcagcagccgcaacagccggtagcgcctcagccgcagtatcagcagccgcaacagccggtagcgccgcagccgcagtatcagcagccgcaacagccggtagcgccgcagccgcagtatcagcagccgcagcagccggtagcgccgcagccacagtatcagcagccgcagcagccggtagcgccgcagccacagtatcagcagccggtagcgccgcagccacagtatcagcagccgcaacagccgacagcgccgcaagacagcttgatccacccgctgttgatgcgtaacggcgacagccgtccattacagcgtccgacgacgccgctgccttcgttagatcttctgacaccgccgccgagcgaagttgaaccggtagatacctttgcgctggaacaaatggcgcgtctggttgaagcgcgtctggcggatttccgcattaaagctgatgtggtgaactattcgccaggcccggtcattactcgttttgaactgaatctggccccgggcgttaaagcagcgcgtatctccaacctttcccgggatctggcgcgctcattgtcaacggtagccgtacgcgttgtggaagtcattccaggcaaaccttacgtagggttggaattgccgaacaagaaacggcaaaccgtttatctgcgcgaagtgttggataacgccaaattccgcgagaatccgtcgccgcttaccgtggtgttaggtaaggatatcgcgggcgatccggtagtggcggatctggcgaaaatgcctcacctgctggtggccggtacgaccggttccggtaagtcggtcggggttaacgccatgatcctcagtatgctgtataaagcgcagccggaagacgttcgctttatcatgatcgacccgaaaatgttagaactctcggtctatgaaggtataccgcatctgctgacggaagttgttaccgacatgaaagacgcggctaacgcgttacgctggagcgtcaatgagatggagcgtcgctataagctgatgtccgcgctcggcgtgcgtaatctggctggttataacgagaaaatcgccgaagcggcccgcatgggacgtccgattccggacccgtactggaagccgggcgacagtatggatgttcagcatccggttctggaaaaactgccgtatatcgtggtactggttgatgaatttgccgacctgatgatgaccgttggtaaaaaagttgaagagctgatcgcgcgtctggcgcagaaagcgcgcgccgcggggattcacctggtactggcgacgcagcgtccgtcggtcgatgtgattactggtttaattaaagccaacattccaacccgtatcgcttttaccgtatccagcaagatcgactcccgcaccattcttgatcagggtggcgctgagtcgctgctaggtatgggggacatgctctactccggaccaaactccaccatgccggtacgtgtccatggggcgtttgtgcgtgaccaggaagtccatgcggtggttcaggactggaaagcgcgcggtcgtccgcaatatgtggatggcattacctccgacagcgaaagcgaaggtggcggtggcggttttgacggcggcgaagaattagatgcgctattcgatcaggccgttaatttcgtcactcagaagcgaaaagcgtccatttccggcgttcagcgtcagttccgcatcggctataaccgtgcggcgcgtattatcgaacagatggaagcgcagggtattgtcagcgctcaggggcataacggtaatcgtgaagtgctggctccgccgccttttgagtaaacctgtaagccggatggcgctgtgcaggctgccatccggcaacaaaattcagtattttcttctttcctcatgctgatttttggcctggaatagaaagcaaaaggagctcctggtcgggagtgtcgaaacctgaggaataatgatgaaaaaaatggcaatcgcctgtgcattactttcaagcgttgtagccagcagcgtatgggctgacgccgccagctctctgaaaagccgtctggataaagtgagcagctttcatgccacctttactcaaaaagtcaccgatggcagcggtgccgcggtgcaggagggacagggtgatttatgggttaagcggccaaatctattcaactggcatatgacgcaacctgacgagagtattctggtttctgacggcaaaacgttatggttctataacccgtttgtagaacaggctaccgccacgtggttgaaagatgccactggaaatacaccgtttatgctgattgcccgcaaccaggccagcgactggcagcagtataatattaagcaggacggcgataattttgtgctgacgccgaaagccagcaacggcaatctgaaacagttcaccatcaatgtgggacgcgacgggactatccaccagtttagcgccgtagaacaagacgatcagcgtagcgcctatcagctaaaatcccagcaaaacggcgcggttgatccgtcaaaatttacgtttactccgccgcaaggggtaacgatagacgaccaacgtaagtagaggcgatgagtgagcaatctgtcgctcgatttttctgataatacgtttcaaccgctggccgcgcgaatgcggccggaaaatttagcgcagtatatcggccagcagcatttgctggccgcaggtaagccgttgcctcgcgctattgaggccgggcatctgcactccatgattttatgggggccgccagggacggggaaaaccacgctcgctgaagtgatcgcccgctacgccagcgccgatgtcgagcgtatttccgccgtcacttctggggtaaaagagattcgcgaagctatcgagcgcgcccgccagaatcgtaatgccggtcgccgtaccatcctgtttgtcgatgaagtgcatcgctttaacaaaagccagcaggacgcctttttaccgcatatcgaagatggcactatcacctttatcggcgcgaccacggaaaatccctcttttgagctgaactcagcgctcttgtcgcgagcgcgggtctatctgctgaaatcgttgaccactgacgatattgagcaagtactggaccaggcgatgcaggacaaaacgcgtggttacggcgatcaggatatcgtgttaccggatgagacacggcgagcgattgctgagctggtcaatggcgacgcgcggcgcgccttaaatacgctggaaatgatggctgatatggcggaggcggatgacagcggcaaacgcgttttattgcccgccttgttgaccgagatcgccggcgagcgcagcgcgcgttttgataacaaaggcgatcgcttctacgatcttatttccgccttacataaatcagtgcgcggcagcgcgccggatgccgccctctattggtatgcccgtatcattactgcgggaggcgatccgctgtacgtggcgcgtcgctgcctggcgattgcctcggaagatgtgggtaatgcagatccgcgcgcgatgcaggtcgccattgccgcgtgggattgtttcacccgcgttggcccggctgaaggcgaaagggcgatcgcgcaggctatcgtttatctcgcctgcgcaccgaagagcaacgccgtctataccgcctttaaggctgcgctggccgacgcgcgcgaacgtcctgattatgacgttcctgtccatctgcgtaatgcgccaaccaaactgatgaaagagatgggctatggccaggagtaccgctatgcccacgatgagcccaatgcctatgctgcgggtgaagtgtacttcccgccggaaatcgcgcaaacgcgctattatcatccgacaaatcgtggtctggaaggcaagattggcgaaaagctcgcctggctggctgaacaggatcaaaatagccccacaaaacgctaccgctagtgtaaacgttgcggtaaggttatctctaaatatgatgctccaggtatcatggcgttgatgatgaatctcgttatgcctgatagcacgttgcttatgaggtccgcgggtatagcgcaatggatgcgttgttgctgtcgtcggtctggtaaggcgaaaacgtcgctattacgtaaacgcggtttacgttcatcaatacaatcagaggcgatcatcaattgatcgcgtttccttttattattcgataagcacaggataagcatgctcgatcccaatctgctgcgtaatgagccagacgcagtcgctgaaaaactggcacgccggggctttaagctggatgtagataagctgcgcgctcttgaagagcgtcgtaaagttttgcaggtcaacacggaaaacctgcaggcggagcgtaattctcgatcgaaatccatcggccaggcgaaagcgcgcggggaagatatcgagcctttacgcctggaagtgaataaactgggcgaagagctggatgcggcgaaagccgagctggataccttgctggcggagatccgcgatatcgcactgaccatcccaaacctgcctgcggatgaagtgccggtaggtaaagatgaaaacgacaacgttgaagtcagccgctggggtaccccgcgtgagtttgattttgaaatccgcgatcacgtcaccttaggggaaatgcactccggcctcgactttgccgccgcggttaagctgaccggctcccgttttgtggtgatgaaaggacagattgcgcgtatgcatcgcgcattgtcgcagttcatgttggatctgcatacggaacagcacggctatagcgaaaactacgtgccgtatctggttaaccacgacacgctgtatggcaccggtcaattgccgaaattcgcaggcgacttgttccatacccgtccgctggaagaagaagcagacagcagcaactatgctttgatcccgacggcggaggttccgctgaccaatctggtacgcgatgaaatcatcgacgaagatcagctgccgattaaaatgacggcgcatacgccttgtttccgttctgaagcaggttcttatggtcgtgatacccgtggcctgattcgtatgcatcagtttgacaaagttgagatggtgcagatcgttcgcccggaagattctatggctgcgttggaagagatgaccggccacgcggaaaaagtgctccagctactgggactgccgtaccgtaaaatcattctgtgcactggcgatatgggcttcggcgcctgcaaaacctatgacctcgaagtctgggttccggcgcagaatacctaccgcgagatctcttcctgctctaacgtctgggacttccaggcgcgtcgtatgcaggcacgttgtcgcagcaagtccgacaaaaagacccgtctggtccataccctgaatggttctggtctggcggtaggtcgtaccctggtggctgtgatggaaaactatcagcaggctgatggccgcattgaagtgccggaagtattacgtccgtacatgaacggactggaatatatcggctaatcctcgctttctcctcttctaaaaagcgccttcgggcgctttttttatgccagtttgataccggacaataatccctaccctattaggggtaatactgatttcgaatgaaggtcagtttttaacactatttttctactttttcgatatatatcagactttatagcgatgctatcgctatataaaattctatacatcgttttattgtttttttattgtgagcagcagagtgagcccttatgaaaactaagatccctgatgccgtgctggcagccgaggtgagccgtcgtggtttagtcaaaaccaccgcgataggcggcctggcgatggccagtagcgcatttaccctgccatttacccgcatcgctaacgccgcagaggcaataagcccggcgaaaaccggcgagaaagtcgtctggagcgcctgtacggtaaactgtggcagccgttgtccgctacgtatgcatgttgtggatggcgaaatcaaatatgtagaaacggataataccggaaacgatgattacgatggcctgcaccaggttcgcgcctgcctgcgcggtcgttctatgcgccgtcgcgtctataacccggatcggctcaagtatccgatgaagcgcgtcggcgcgcgcggcgaaggtaaatttgagcgtattagctgggacgaagcctacgatatcattgccaccaatatgcagcgtcttatcaaagagtatggcaacgagtccatttatctgaactatggcacgggaacgctgggcggcactttgacacgttcatggccgccaggaaaaacgctggtcgctcgtctgatgaactgctgcggcggttatcttaatcactacggtgattactcttccgcgcaaatcgcagcgggtctgaactacacctatggcggctgggcggatggcaatagtccgtccgacattgaaaacagtaagctggtggtattgtttggcaataaccctggcgaaacccgcatgagcgggggcggtgtaacgtattatcttgaacaggcgcggcagaaatcaaacgcgcggatgatcattatcgaccctcgttacaccgacactggcgctggtcgcgaagatgagtggattccgattcgtccaggtaccgatgcggcgctggtcaatggtctggcatatgtcttaatcaccgagaacatggtcgatcagccgttcctggataaatattgcgttggttatgacgaaaaaaccttgcctgccagcgcgccgaaaaacggtcactacaaagcctatattctgggccagggtaaagacggtatcgcgaagacgccggagtgggcggcgcaaattaccggtatcccggcggatcgcattattaagctggcgcgagaaatcggcagcgctaaacccgcctatatttgccagggatggggaccacaacgtcatgctaatggagaaatcgccacgcgcgccatctcgatgctggcgatcctgacgggtaatgttgggattaacggaggtaatagcggcgcgcgcgaagggtcttatgccctgccatttgaacgtatgcccacgttagaaaacccggttgaaaccagcatctccatgtttatgtggaccgatgccattgaacgcggcccggaaatgacggcgctgcgtgatggcgtgcgggggaaagataagctggacgtgccgatcaaaatgatctggaactatgctggcaactgtttgattaaccagcactctgagattaaccgcacccacgaaatcctgcaggatgacaagaaatgcgaaatgatcgtcgttatcgactgtcatatgacctcgtcggcaaaatacgccgatattctgttgcctgattgcactgcttctgagcagatggactttgcgctggatgcctcctgcgggaacatgtcttacgttatcttcactgaccaggcgattaaaccgcgcttcgagtgtaagacgatttatgagatgaccagcgaactggcgaaacgtcttggcgtggaacaacagtttaccgaaggacggacgcaagaagagtggatgcgtcatctgtacgaacagtcgcgtaaatccattccgaatctgcccacctttgaggagttccgtaagcaaggcatcttcaaacagcgtgaccccgaaggccaccatgtcgcctataaagacttccgcgaagatccgcaagcgaatccacttacaacgccatcgggcaagattgaaatctattcacaggcgttggcggatatcgccgccacctgggagctgccggaaggcgacgtgatcgatccattaccgatctacacgccaggttttgaaaactataacgatccgctaacggataaattcccgctgcagttgacgggtttccactataaagcgcgtgtacattccacttatggcaacgtagacgtactgaaagccgcctgtcgccaggaaatgtggattaacccaatggatgcgcagaaacgcggtatcaacaatggcgacaaagtccgcatcttcaacgatcgcggcgaagtacatatcgaggctaaagtgacgccgcgcatgatgccgggcgtggtcgccctgggagaaggcgcatggtatgacccggatgcaaaacgcgtggatcagggcggatgtattaacgtactgacgacccaacgtccttctccgctggcgaaggggaacccgtcacatacgaacctcgttcaggttgaaaaggcgtaaggagtaaccgatgacaacccagtatggattttttattgattccagccgttgcaccggttgcaaaacctgcgaactggcctgcaaggactacaaagatttgaccccggatgtcagcttccgccgcatttatgagtatgcgggcggcgactggcaggaagataacggcgtctggcaccagaacgtctttgcctactatctctccatctcctgtaaccactgcgaagacccggcctgcaccaaagtctgcccgagcggcgcgatgcacaagcgcgatgacggttttgtggtggtgaacgaagaggtctgtatcggttgccgctactgccacatggcctgcccgtacggcgcgccgcagtacaacgcggccaaaggtcatatgaccaagtgcgatggctgttatgaccgggtggcggaaggtaagaaaccgatttgcgtcgaatcctgcccgctgcgggcgctggactttggtcctatcgatgaactgcgcaaaaaacacggtgagctggctgccgtcgcgccgttgccgcgcgcgcatttcacgaagccgaatattgtgattaaacccaacgccaacagccgcccgaccggggacaccaccggttatctggccaatccgaaggaggtataagatgggaagtggatggcatgaatggccgttgatgatcttcacggtctttggtcagtgcgtggccggtggttttattgttctggctctggcgctgatgaagggcgacctgcgcgcggaaacgcagcagcgggtgatcgcctgtatgtttggtctgtgggtgctgatggggattggctttatcgcctcgatgctgcatctgggctcgccgatgcgcgcgtttaactcgcttaaccgcgtgggtgcttccgcactgagcaatgaaattgccagcggctcggtgttttttgcggtcggcgggatcggctggctgctggcggtactgaaaaagctgccgccggcactgcgcacactctggctgattatcacgatggtactgggcgtcgtcttcgtctggatgatggtacgcgtctataacagcatcgatacagtaccgacctggtatagcgtctggacgccgctgggcttcttcctgacgctctttatgggtggcccgctactgggttatctgctgctgcgcatcgcgggcgtgaacggttgggcgatgcgtttgttgcctgcggtttcggtgctggcgctggtggttattgccattatggtggccatgcagggcgcggaactggcgacgattcacagttccattcagcaggcgtctgctctggtgccggattatggttcgctgatggcctggcgtatggtgctgcttgcggcggcgttgtgctgctggattgtgccacagttaaaagggtatcaacctgcggtaccgttgctctctgtcgccttcattctgatgctggcgggggaattgattggccgcggcgtattctatgggctgcatatgaccgtgggcatggcggtagccagttaacgcgttgacgcgcattcggcctgcagaacgtgcaggccgaattcgcctttagccgccatcaatctaaggaatataaccggggcggagaaggcgcatataaatccatagagaagaaaacgaagctaaaggaaccatgaaatttttcgactgaacaaaacgccgattttgcgggttagattaataaaaacaagaggatgaatttttagcctttcaatatattcacgcgcagaataagtaaatcaaatcgatagtctcaaaacttgcggatcgcccatgcggagccgattgacaatgtttttggcgatggcatgatgcgcatgaaatttgaacttcctcacggtttttattcatgtccacctatacccgtcccgtcatgcttttgctgtgcgggctacttttgttgactctggccattgcggtactgaatacgcttgtgccgctgtggcttgctcaggcaaaccttccgacctggcaggtggggatggtcagctcgtcttattttaccggcaatctggtcgggacgttatttaccgggtatttaattaaacgcattgggtttaaccgtagctattatcttgcctcgctgatcttcgccgcgggttgtgtcggattgggggtgatggtggggttctggagctggatgagctggcgttttattgccggtatcggctgcgccatgatttgggtggttgtcgagagcgcgttgatgtgcagcggaacctcgcataatcgcgggcgcctgctggctgcctatatgatggtctattatatggggaccttccttggacaattattggtcagtaaagtatctggtgaattgctgcacgttcttccctgggtgaccggaatgattctggcgggaattctgccgctactctttacccgaattgtaaatcagcaaacgcaggcacgtcattcctcttctattagcgccatgctgaagctacgccaggcgcgtcttggcgtgaatggttgtattatttccggcattgttcttggttcattatatggcctgatgccgttatatctgaagcatcaggggatggctaacgccagcatcggtttctggatggcggtgctggtgagtgccggtattttggggcaatggccaatgggacgtctggcggacaaatttggtcgcttgctggtgttacgcgtacaggtattcgttgtcatactcggcagtattgccatgttaacccaggcggcgatggcgccagctctgtttattctgggggcggcgggttttacgctttatcccgttgcaatggcctgggcctgtgaaaaagtcgaacaccaccagcttgtggcaatgaaccaggcgctgttgttaagttatacggtagggagcctgttggggccgtcttttgctgcgatgttaatgcagaattattcagataatctgctgtttattatgatcgccagcgtatcgtttatttatctgctgatgctgttacgtaacgccggccagacgcctaatcctgtcgcccacatctgactgttctctgaatcgtatgcaggacgtgagtcttgcatactctttgtttatgttttacgtgaaataattgacctgcataattttcttgctttactgaaaaataaaatgtgccgaaggttataattttgcgctcctctattttctctcttcgtctttaccgcgcataattccccgcttcatttatagtaatagcattgtgttcacgaaggatcgcgttatgccgaatgtgcaggaaaaacagttgcgatggtacaacatcgccttgatgtcgtttattaccgtttggggattcggcaatgttgtcaataactatgctaaccaggggttagtggttgtcttctcctgggtgtttatttttgcgctctattttattccttatgccttaatcgtggggcaactgggctcaaccttcaaagagggaaaagggggcgtcagtacctggattaagcatacgatggggccggggttggcttaccttgcggcatggacttattgggtcgtgcatattccctacctggcgcaaaagccgcaggcgatactcattgcattgggatgggctttaaaaggcgacggctcgttgataaaagaatataccgtcgttgccttgcaggggctgacgctggcattgtttgttttctttatgtgggttgcttcccgggggatgaaatcgctaaaggttgttgggtctgtggccggaattgccatgtttatcatgtcaattttatatgttgtgatggcagtgaccgcgccagcaattacaaacgttgaaattgcgaccactaacatcacctggcagtcatttattcctcatatcgattttacctatatcaccaccatctctatgttggtctttgcggttggtggggcagagaagatctcgccttatgtcaaccagacgcggaatccaggaaaagaatttccgaaggggatgctctttttagccgtcatggttgcggtctgcgctatcctcggttcgttggcgatgggaatgatgtttgattcccggcatatacctgacgatttaatgaccaatgggcaatattatgcattccagaaattgggtgagtattaccatatgggtaattcattaatggttatttatgccattgccaatactctggggcaaatcgccgcgctggtgttttctattgatgcgccactgaaagttttactgggtgatgcagacactaaatatatcccgcagcgcttatgtcgtactaacgcttcaggtacgcctgttaacggttatttgctgacattagtgttggtcgctatcttgattatgttgccaacgcttggcatcggcgatatgaacaacctgtacaaatggctgcttaatctcaattcagtcgttatgccgctgcgctatctgtgggtatttgtcgcctttattgccgtcattcgactggcgcaaaagtacaaacccgaatatgtgtttattcgcaaccgggcgttggcgttaactgtgggaatatggtgttttgccttcaccgcgtttgcctgccttaccggtattttccccaaaatggaggcgttcacgccggagtggacattccagctgacgttgaacatcgtgacgccttttgtcctggtcgggttgggattaattttcccactgctggcgcgtagaaacacataacgacgctcttttccacggcgctcctgtcaggcgagcgccttttaaggttacaggtgcctgggttccaggcggagaccacggtattaacaggcgccgggggcagcaatagttgtcagaccttcaacccagcagcagataagcgactctgtatttaatacctggttagcgcaatattgttaaccatgcctgtctgatggcggggtcgggtattttagcggtaagagcgttatccagacagcaaaacggctaccgtcatgggtagccgtttaaaagcgggtaagatagcaggcgattaatacatcactttatgaccatactgctcaagaataccctttacacgctccatggtctcttttttaggcggcttcacgccatccagtttatattcttcgcccattgccacccatttatgtttgcccagctcatgatagggcaacagttcgattttttcgacattacccatatcgcgggtaaactcgcccaggcgatgcgcggaatcatcgtcgtcagaccagccgggaacgacaacgtaacggatccagaccttcacatttttctttgataaatactgcgcgaattccagcgtccggtgattagagacaccgaccagattctggtggatctcatcattcatctgcttgagatcgagcatcaccagatcggtaacgtccaacagttcatcaatcaccgggtcataacggcgcacaaagccgttggtgtcgagacaggtgtggataccttcttttttacaggcgcgaaaccagtcgcgtacaaattctgcctgcaaaatggcctcgccgccggatgccgtcacgccgccgccagaagcattcataaaatgccgataggtcaccacctctttcattaagtcttcaacggtgatttctttaccgccatgcgtatcccatgtgtcgcggttatggcaatacaggcagcgcatcaggcagccttgaaaaaaggtaataaagcggatgcctgggccatcaacggtgccacaggactcaaaggagtgaatgcgaccaataaccggctttttatcagcagttactgcaacactttcatttgtaatacaattggttaagttactcatatcgcttcggctagctctaaataacatggggtttatggacacattccgggcatgttgagcaccctggtaagggggttgcatcctgtaaaaaagcggtactgcgagcgtaaattttggactacagaatgtgtggctgttccagaatgtgctgcaatggagctattttacctctattcagtataaaatatacggcaaatctatgctgcataactcgcaccgccagaaattctggctcattcatcagctcgtaacgcctcaaccgcaatacatactgcaagtgtatcatccatagcgccctggttttactgtttatgatccgcctcttttttcgaatggttggcgccgttttgttgtggtcagaacgaaaataattctcaacataattcagatgtgtccaaagaacgttatgcgctgtccagcgcctggcgtcgcattcaacgcgcaatcaggtgtaaatctgatgtcatttctaaacccaggctgattcaatctcttaaatagagtgtggttttaatcaaaaaatgagagcaacggattggatcttgctttcgcggtaaataatcaagggagttattatgccagttacgttaagttttggtaatcgtcataactatgaaattaatcattcacggctagcccgtttgatgagtcctgataaagaagaagcgctatacatgggggtatgggatagatttaaggactgcttcagaacacacaaaaaacaagaggtgctggaggtattatatacactcatccatggatgtgaacgtgaaaatcaagctgaacttaatgttgatataaccggcatggagaagatacatgcctttacacaattaaaagaatatgctaatccatctcaacaagaccgctttgttatgcgttttgatatgaatcagacacaagttttatttgagattgatggcaaggttattgataaatgtaatttgcatcgtctcctcaatgtttcagaaaactgtatttttaaagtgatggaagaagatgaagaagagttgtttcttaaaatatgtattaagtatggagaaaaaatttctcgctatccagaattattagaaggatttgctaataaacttaaagatgcagttaatgaggatgatgacgttaaggatgaagtttataagcttatgcgatctggagaagatcgaaaaatggaatgtgttgaatggaatggtactcttactgaagaggagaagaataaactacgctgtcttcaaatggggtcttttaatattactacccaattttttaaaataggttactgggaattagagggggaagtcctgtttgatatggttcatccaacacttagctatctgctacaagcatataaaccgtcattgtcatctgatttaatagaaactaacaccatgctgttttctgatgtattaaataaggattatgatgattatcaaaataataaaagagaaattgatgctattctaagaagaatatatagatcacataataacactttatttataagtgaaaagtcgagttgtcgcaatatgcttatataaaaagtcattaaaaaggccccactgatatggagccttttttgtacgctttttatggcgtaatttcagtcaaacccattacatggtctgcgtgaaggtacgagtaataacgtcctgctgctgttctttcgtcagggagttaaaacgtactgcgtaaccagatacacggatggtcagctgcggatatttttccggatgttccatcgcgtccagcagcatttcacggttcatgacgttgacgttcaggtgctgaccgccttcgatggacgcttcgtggtggaagtaaccatccatcagacctgccaggttagtcttacgaacttcgtcgtctttacccagtgcgttcggaacgatagagaaggtataagaaataccatctttcgcgtaagcaaatggcagtttagcaacggaggtcagagaagcgacagcgcctttctggtcacgaccgtgcatcgggttagcacctggtccgaacggcgcgccagcgcgacgaccatccggggtgttaccggttttcttaccatacacaacgttagaagtaatggtcagaacagactgtgtcgggatagcgccacggtaggtggtcagtttctgaattttcttcatgaaacgttctaccaggtcaaccgccatgtcatctacacgagcgtcgttgttaccaaactgcgggtattcgccttcgatttcgaagtcgatagccagaccatcttcgtcacgaatcggtttaactttcgcatatttgatggcagacagggagtcagcagcaacggacagacctgcgataccacacgccatggtgcggataacgtcacggtcgtgcagcgccatcagagaggcttcgtagctgtacttgtcgtgcatgtagtggataacgttcagcgcggtgacatactgtttagccagccagtccatgaagtgatccatgcggtccatcacttcgtcgaagttcagaacatcgcctttgatcggttcggatttcggaccaacctgcattttcagtttttcatcaacgccgccgttgatagcgtacagcatggttttcgccaggtttgcacgcgcgccgaagaactgcatttgtttaccaacgatcatcgggcttacgcagcatgcgatagcgtagtcatcgttgttgaagtccggacgcatcaggtcatcgttctcgtactgcagagaagaagtgtcgatggagactttagcggcgaatttcttgaagttcagcggcagtttttcagaccacagaacggtgatgttcggctccggagacggccccatggtgtacagggtgttcaggaaacggaagctgtttttggtgaccagagtacggccatcaacgcccataccgccgatagattcggttgcccaaatcgggtcgccggagaacagttcatcatattcaggagtacgcaggaagcgaaccatacgcagtttcatgaccaggtggtcaatcatttcctgtgcgtcttgctcggtgattttgcctgctttcaggtcacgttcgatgtacgcatccaggaaggtggatacacgaccgaaggacattgctgcgccgttctgagatttaaccgcagccaggtaaccgaagtaagtccactggattgcttcctgagcgttagtcgccggaccagagatatcgcagccgtatttagctgccatttctttgatctgacccagagcgcggtgctgttcagcgatttcttcacgcagacggatagtcgcttccagatttacgccgttttccagatcggattgcagagacgtaaactgtgcgaatttgtctttcatcaggtagtcgataccgtacagcgctacgcgacggtagtcaccgatgatacggccacggccatacgcatccggcagaccggtcagaacgccggatttacggcaacgcaggatgtccggagtataaacgtcgaacacgccctggttgtgagtcttacggtattcggtgaagatttttttgatcattgggtccagctcgcgattgtacgctttgcaggaaccttcaaccattttgatgccgccgaacgggataatcgcacgcttcagcggagcttcagtctgcagaccaacaattttctcaagcgctttgttgatgtagccagcgtcgtgagaagtgatggtggaagcaacggaggtgtcaaagtcaacaggcgcgtgagtgcggttttcctgtttaacgccttccattacgctgtcccacagcttggtggtcgcgtcagtagcgccagccaggaaggactcgtcaccctcatacggagtgtagtttttctgaatgaagtcacggacgtttacttcattctgccagtcacctttggtaaaaccttcccaggctgtggctaacttttcattaagctcggacatgtaacacctaccttcttaagtggattttttatttactgcgtgtaatgggcatcaacagattaatgatgctcgttaccacgcaggtaaatgacccagtatgtcaacccgaccaacaaaccgccgccgataatattaccgatcgtgaccggaatcaggttatcagtgatgaagctcatcacggtcaggtgagaaaaactttccggagacgaaccaaccgcggtccaaaactccggtgtagcaaaatcgcgtattacaatacccataggaatcataaacatgtttgcgatactgtgctcaaaaccgctggcgacaaacatggcgacgggcagtaccatgatgaacgctttgtccatcaggctacgacctgagtagctcatccacacggccagacaaaccatcaggttcgccagaataccgaggcagacagcttcaataaaagtgtggtgcattttgtggtcggcggtttgcaggacgttaagtccccattgaccgttggcagtcatatactcgccggaaagccacatcagtaacacgaaaagcagagcgccaatcaggttaccaaaatagacgtttaaccagtttttagccagttgcccccaggtgatgcgaccgctagctttagctacaacgatcagaacagtagaggtgaagagatcagcgccgcaaataacacagagaatcagtcccaaagagaaacagatacccccgataagtttcgccatgccataaggcatcgcgccagtaccggttgtcgcagtaatataaaaaacaaaggcaattgaaatgaatacgccggcggtaatcgccagatagaaagtcttaagcggatgtttcgttgctttatagacgcctgcttcttcagccactttggccattgctgcagggagtaaaaggtcaaaagggttgtcagctttcacactaactctctctttattaagtcggcgacgagatactaacaaagcattatagatgagaatttgatatagatcatatctcgcctggcttataggcccgtaagtcgcatggcttttatgcaattacggtgtaactttttgattatcctaataaaaataaattttaaaaattataaatagagttgaattttttcctgactcctcctgctgcacggttaattaatatggagtaatcaacaaataaagtaacatcactatgtcaattaatttaatatcaacaaccaatatttaaccttgttattacatttttcgccgtttagcgaaaataaataaaacggggccgcaaaggcgccccgtaatataacgcagccgagagggtaaacctaccctaagtcactcatatggccttattttgaccagtatgccgctttcgcgcgctgtaatttatcatacgcttttaacaaggactgatgcgccgggaacgcttgtagatcgtggtcgacagccggtagtccataaaaagccgcttcaccgctaagcgcggcgctggcggcctctacagcctctgcgccatacatttttataaaagcattgagatattgcagtggctgacgcgcatcttcttgcgacaggagcagcagagtttgcaggcaacggtaatagtttgcgcgtgtcggactaaagaccgacgaattgaactccatcgtccattctgtccagattagcgcctgctccaaatcgccgcccgctaacgctaacattgcttttaattcgccgacgcgcagtgtataccaaccattgtccgctccggtcgccagacccaacagttcacgcacgcgggtgaaatcgtcaaaaccttcttcatccaattgttcaatcagattgagataatcttctttattccaggcgctaccgggcagcgaaagcagagtctcacgaagatggctacccatattgttgttggccagccacagatcttcggcaggataaatatcagacattcccggtacgataatacgacaggcgtatacgccgagatgctcgtaatcggcaatgtaaacttctttatcttcagcagcaaagatggccatcagcgtggcgaattcttcttcggtagtgccggaaaaactccagtccgtgaacggataatcggcgtcctgtttgaacagatcccaggaaatcaggccgctggagtcgatgaagtgggtctccagattagtgtgctccgcgacttcttcatcatcgaacgttggtggcgtgaagacatcaagatctttcagaccgcgtccctggagtagctcggtcactgtacgctccagcgcaacgccaaagtcaggatgggcgccaaaagaagcaaagcaggtaccgttagccgggttgaacagcacgacgcagataaccggatacttaccgcccagcgagccgtcataggcgaaaatcgggaaaccctcggcttccagcgtggcgattgactccattaccgccggataacgcgccatcacctctgcgggaatctccggcagactgatactttccgcaatgatgcgatttttcacataacgctcgaagacttccgacagtccctgaacgcgggcttcattacgcgtattgccggcggacattccgttagagacgtacaggttgccgatgatattcatcggaatatacacggtctggttatcggactgacgggtaaatggcaggccgcagacgccgcgagcttcattgccggactgaagatcaattaactggcttccggtgagttcattttccggatcgtaaaacgcgcgcagacgggcatcaagcaagccttccggtacgtcgtcattttcagtcagcgggaaccacttttcgttcgggtaatgcacgaatggcccattggcgaccgtttcgccaagccagaaatcagcaaagaagtagttggttgacagacgctcgaagtattcgcccagcgccgaggccagcgccgcttttttggtcgcgccttttccgttggtaaagcataacgcgcactctttatcgcgaatatgcactgaccagacgtttggcaccgggttcagccaggaggcctcttcgatgtgaaagccgaggtcgagtaacttttgctggaagcgggcgatggagtcttccagcgcggcgtctttgccgggaataaatgtttgcgtcatgaaaatcacttttgtcgtacggaaagcgcgcaatgatacgggttttatgtgacgggcgctatctcgccgggacatcggcggaaataaaagtattggctatgcttttacactggcattcacaggaagagcataaaaaatgaaagcatttgatttgcaacgaatggcgctggataacgtgccggtagcgtttttgggggaagtggcgctgcgtagcttttacacctttgttctggtgtttcttttcttaaaggtgacaggacgacgcggcgtacggcaaatgtcgctttttgaagtgctgatcattttgacattggggtcggcggcaggcgacgtcgcgttttatgatgacgttccgatgctccctgttctggtggtattcatcaccctggcgctgctctatcgcctggttatgtggctgatggcgcatagtgaaaagttggaagatctgctggaaggcaagtcggtggtcattgttgaagacggcgaactggcgtgggaaaaactgcagcgctcgaacatgacggagtttgagttttttatggagcttcgcttgaatggcgttgagcaactggggcaggtcagactggccatcctggagacaaacggacaaatcagcgtctatttctttgaaaataaagacgttaagccggggttaagcattcttcctgagcactgtacgccacgctttatcgtggcgccggaggctggcgactatgcctgcgtacgttgcagtgaagtgatacgcatgaacgccggggaaaagcaattatgtccgcgctgcgcaaatccagaatggacgaaggcaagccgggctaaacgcgttgtttaacagcgaaaatatcggatttatacggttaatccggaagattctgttgtgtgacgcatgccgcattttctcctcgcattgttttacccattgcggcgcgtgtcactgaatgataaaaccgatattcacatgaataacgtttgcctgatgtctgtcaggcaggaaacaatgcagcgtggtgaggggaaatggctcaggtctttaattttagttcaggtccggcgatgctaccggcggaagtacttaaactggcgcaacaggaactgtgtgactggcacggtcttggtacgtcggtaatggaaattagccatcgaggcaaagagtttatccaggtcgctgaagaggcggagcaggattttcgcgatctccttaatatcccctccaactataaagttttattttgtcacggcggcggtcgcgggcagtttgctggcgtgccgctcaatctgctgggcgataaaaccacggcggattatgtcgatgccggttactgggcggcgagcgccatcaaagaagccaaaaaatactgtgcgccgcagattatcgacgccaaaatcaccgtggacggcaaacgtgccgtaaaaccgatgcgcgagtggcagctttccgataatgccgcttatttgcactattgcccgaatgagaccattgacggcatcgccatcgatgaaacgccggattttggcccggaggtggtcgtcacggcggacttttcttctaccatcctgtctgcgccgctggacgtctctcgctatggcgtaatttatgctggcgcgcagaagaatatcggtccggcaggactgacgctggttatcgtccgggaggatctgttaggcaaggcgcatgagagctgcccgtccatcctcgactacaccgtcctgaatgataacgactcgatgtttaatacgccgccgactttcgcctggtatctttccggtctggtgttcaaatggttgaaagcgcagggcggcgtggcggcgatgcacaaaatcaatcagcaaaaagcggagttgctgtacggtgtgattgataacagcgatttctaccgtaacgatgtcgcacaggccaaccgttcgcggatgaatgttccgttccagttagcggacaatacgctggacaaggtctttctggaagagtctttcgccgccggtctgcacgccttaaaagggcaccgtgttgttggcggtatgcgcgcctctatctataacgccatgccgattgaaggggtaaaagcgctgaccgatttcatgatcgattttgagcgtcgccacggctaatacgtttcttttttcatccccacggccagtctgtggggtttttatttctgttttttgagagttgagtttcatggaatccctgacgttacaacccatcgcgcgggtcgatggcgccattaatttacctggctccaaaagtgtttcaaaccgtgctttgctcctggcggctttagcttgtggtaaaaccgctctgacgaatctgctggatagcgatgacgtccgccatatgctcaatgccctgagcgcgttggggatcaattacaccctttctgccgatcgcacccgctgtgatatcacgggtaatggcggcgcattacgtgcgccaggcgctctggaactgtttctcggtaatgccggaaccgcgatgcgtccgttagcggcagcgctatgtctggggcaaaatgagatagtgttaaccggcgaaccgcgtatgaaagagcgtccgataggccatctggtcgattcgctgcgtcagggcggggcgaatattgattacctggagcaggaaaactatccgcccctgcgtctgcgcggcggttttaccggcggcgacattgaggttgatggtagcgtttccagccagttcctgaccgctctgctgatgacggcgccgctggcccctaaagacacaattattcgcgttaaaggcgaactggtatcaaaaccttacatcgatatcacgctaaatttaatgaaaacctttggcgtggagatagcgaaccaccactaccaacaatttgtcgtgaagggaggtcaacagtatcactctccaggtcgctatctggtcgagggcgatgcctcgtcagcgtcctattttctcgccgctggggcgataaaaggcggcacggtaaaagtgaccggaattggccgcaaaagtatgcagggcgatattcgttttgccgatgtgctggagaaaatgggcgcgaccattacctggggcgatgattttattgcctgcacgcgcggtgaattgcacgccatagatatggatatgaaccatattccggatgcggcgatgacgattgccaccacggcgctgtttgcgaaaggaaccacgacgttgcgcaatatttataactggcgagtgaaagaaaccgatcgcctgttcgcgatggcgaccgagctacgtaaagtgggcgctgaagtcgaagaagggcacgactatattcgtatcacgccgccggcgaagctccaacacgcggatattggcacgtacaacgaccaccgtatggcgatgtgcttctcactggtcgcactgtccgatacgccagttacgatcctggaccctaaatgtaccgcaaaaacgttccctgattatttcgaacaactggcgcgaatgagtacgcctgcctaagtcttctgttgcgccagtcgacgggctggcgcgccgagtccgtattcgcactatttttataattatgactaatgctaatttgttgatgatttaacacattgatttatgtgttttttataatagttatcaacggaagattagtatgaaaaataaatcattactactggcggtggcgatttccgccacgctactggcaggatgtaaaaatggcgtgaatggcaatttaatcgccagttcaggcatgtcaacctacaaagccgccacactgtccgatgcggatgttaaggcattatctaataatgcctgtaaacaaatggacagcgagaatcaactggcaggttcgaaaagcaaatacaccaaacgtctgagcaaaatcgccaaagcgctgggtaacaacattgacggtacgccggttagctataaagtctatatgaccagcgatatcaacgcatgggcgatggcgaacggttgcgttcgcgtatactccggcctgatggatctgatgaccgataatgaaattgaaggcgtactgggccatgaactgggccatgtctctttagggcactctcgcaaggcaatgcagaccgcttatgccacgctggcggctcgcgatgcgatttccgccaccagcggcgtcgcagcgcagctttcccagtctcaattgggcgatctggcggaaggcgtcatcaattcggcgttttctcgcagtcaggagtcggatgcggatgacttctcttacgatctgctgaaaaaacgcgggattaacacccagggcttagtcacggcattcgataaattcgccacaatggacgcaggtcatgcaaaatcattgatggactcccacccggcttcagccgatcgcgcgcagcatatgcgcgacagaattgccgaagataaaaagtaaatcattgtcatctttcgggctggtttctcgccggcccgctataattgcgcaattattccgcatctgattacagacaaaactggtttttgcacgcaacgttaacggtcgcgagcgttggcgcgtataatgcgcggcgtttacgttaacggtacgcctgtttaaggagataaagatgacggcaattgccccggtaataaccattgatggcccaagcggtgcaggtaaaggcaccttgtgcaaagcaatggcggaagcattgcaatggcatctgctggattccggcgcgatataccgcgtactggcgctggcggcattgcatcaccatgtcgatctcgcctctgaagatgcgctggtgccgctggcgtcccatctggacgtgcgtttcgtctcaacggacggcaacctggaagttatcctggaaggcgaggacgttagcggcgaaatccgtacgcaggaagtcgcgaacgcggcatcccaggtggcggcattcccacgcgtgcgtgaagcgcttcttcgccgccaacgcgcattccgcgaagcgcctggtttaatcgccgatggacgcgatatggggaccgtggtcttcccggatgcgccggtaaaaattttccttgacgcctcctcggaggaacgtgcgcatcgacgtatgctacagttgcaggagaatggctttagtgttaactttgaacgccttttggccgagatcaaggaacgcgacgatcgcgatcgtcatcgtgccgttgcgccgttagttcctgctgctgatgcattagttttggattctacccgattaagcattgagcaagtgattgaaaaagcgttacaatatgcgcgccaaaaattggctctcgcttaaatgcgaccgaatttgtagtacccccgttgcaaaggattgacagcgggtatgttaaacaaccccatccggcacggagccaggtggacgttaaatatgaaacctgaagattaaacatgactgaatcttttgctcaactctttgaagaatccttaaaagaaatcgaaacccgcccgggttccatcgttcgtggtgttgttgttgctatcgacaaagacgtagtactggttgacgccggtctgaaatctgagtctgccattccggctgagcagttcaaaaacgcccagggcgaactggaaatccaggttggtgacgaagttgacgttgctctggatgcagtagaagacggcttcggtgaaactctgctctctcgtgagaaagctaaacgtcacgaagcatggatcacgctggaaaaagcttacgaagatgctgaaactgttaccggtgttatcaacggcaaagttaagggtggcttcactgttgagctgaacggtattcgcgcgttcctgccaggttctctggtagacgttcgtccggtgcgtgatactctgcacctggaaggcaaagagcttgaattcaaagtaatcaagctggaccagaaacgtaacaacgttgtggtttctcgtcgtgccgttatcgaatccgaaaacagcgcagaacgcgatcagctgctggaaaacctgcaggaaggcatggaagttaaaggtatcgttaagaacctcactgactacggtgcattcgttgatctgggcggcgttgacggcctgctgcacatcactgatatggcctggaaacgcgttaagcatccgagcgaaatcgtgaacgttggcgacgaaatcaatgtgaaagtgctgaaattcgaccgcgagcgtacccgtgtatccctgggcctgaaacagctgggcgaagatccgtgggttgctatcgctaaacgttatccggaaggtaccaaactgaccggtcgcgtgaccaacctgaccgattacggctgcttcgttgaaatcgaagaaggcgttgaaggcctggttcacgtttccgaaatggactggaccaacaaaaacatccacccgtccaaagtggttaacgttggcgacgtagtggaagtgatggttctggatatcgacgaagaacgtcgtcgtatctccctgggtctgaagcagtgcaaatctaacccgtggcagcagttcgcagaaacccacaacaagggcgaccgcgttgaaggtaaaatcaagtctatcactgacttcggtatcttcatcggcctggacggcggcatcgacggcctggttcacctgtctgacatctcctggaacgttgcaggcgaagaagcagttcgtgaatacaaaaaaggcgacgaaatcgctgcagttgttctgcaggttgacgcagaacgtgaacgtatctccctgggcgttaaacagctcgcagaagatccgttcaacaactgggttgctctgaacaagaaaggcgctatcgtaaccggtaaagtcactgcagttgacgctaaaggcgcaaccgtagaactggccgacggcgttgaaggttacctgcgtgcttctgaagcatcccgtgaccgcgttgaagatgcgactctggttctgagcgttggcgacgacgttgaagctaaattcaccggcgttgatcgtaaaaaccgcgcaatcagcctgtctgttcgtgcgaaagacgaagctgacgagaaagatgccatcgcaactgttaacaaacaggaagatgcaaacttctctaacaacgcaatggctgaagcattcaaagcagctaaaggcgagtaatcctctgaaacttcgggtcttttagtccgaagtataacgagattacttgacagattgcaggtttcggcctgtaatcaagcactaagggcggctacggccgcccttaatcaatctcacggctgcagccaatttgcctttaaggaaccggaggaatcatgaccaagtcagaattgattgaaagacttgcaacccagcaatctcacattcccgctaaggcggttgaagacgcggtaaaagagatgctggagcatatggcctcgactcttgcgcagggcgagcgtattgaaatccgcggtttcggcagtttttctttgcattaccgcgcgcctcgtaccggacgtaaccccaagaccggcgataaagtggaactggaaggaaaatacgttcctcactttaaaccgggtaaagaactgcgcgatcgcgccaatatttacggttaagttttaacgcaaaacttgaacccgaaaaaagcaccgtcagggtgcttttttcatttatacgccgtcaggcgcaaacgctattcgaccgaaaactggaaaacgtttcgcattttttgctgcgtcttacatttatcaggtaaaaaacctggaatccgcgccgtatagcacaaaatcccctccagacaatggcgtcctgaacctgcacactttcccgcacagggaggtgtctatgaagataacgacggtcagcgtatgcgtagtatgcggcatacttccactcatgatattgccagtattacctgatacgtggattctcgcggtgctgttttgtctggcatgtttgctttgcctcataccccatcactatgcgcgctacgcggcattaactttgctctttttcatgtgggggatatttgccgccaggcaggccatctgggcgggaaacgtcctgcccgccgcgacgcaggaggcgacagtcgtcattactgccaccgatcatatgaccactcattatgggcgaatcacccatttgcgcggaaagccgctctttcctgctgtagggattgtcctgcatggccagtacttacccacggaagtgtgtgccgggcaacagtgggcgatgacgctgaaggtcagagcggtacacggacagcttaacgaaggcggttttgatagccagcgttacgcgctagcgcagcaccaaccgttgaccgggcgtttcctacaggctaaagcgattaaccctgagtgtagcttgcgtgggcgctatcttgcttcgcttcgcgctacgcttgcgccttatccgtggcagcaggttattctggcgttgggaatgggggagcggggagcggtgtcgcaggaggtgaaggccgttatgcgcgatacggggactgcccatttgatggcgatttccggcctgcatatcgcttttgctgcgttattggctgccggattaatccgtggcggacaattctttttgccggtcagatggattcgttggcagacgccattgctgggcggcattctttgcgcgatatgttatgcctggcttaccggcttacaaccgcctgcgctgcgcacggtggcggcgctgagcgtctggggaggattaaaattaagcggacgacagtggagcggctggcaagtctggtgctgctgtctggccgcgattattttcgccgatcctgtggcggttatatcacaaagtctttggctgtcagcatttgcggttgccggcctgttattctggtatcagtggtttcctgcgccaaacggaaattttccacgaggcttacgctggttgcttaacctgcttcacctacaggcaggcattacacttctgcttttgcctctccaggtggcgctttttcatggcataagcgttaccgcaatgctggcgaatctttttgccgtaccctgggtcacatttgtgacggttccactcatcctggcgggaatgattctgcatttaaccgggccgttttttcttgaagagtgggtatggtacctgaccgatcgcgcgttagccgcgctattttacctgttgaatgctttaccgcagggctgggtcaatattgataaccgttggcagtggctgacgcttttaccctggttaacgcttatcgcgtggcgattaaacgtctggcgtacctggccggcggtttgtttatgcgggttattgttgatgagctggccactctggcggccgataaacgccagcggatggcaggtgcatatgctggatgtcggtcaggggctggcgatagcgatcgtcaggggcgataaagtaatactctacgataccggtcgggcatggccggagggcgacagcgggcaacaggttattattccctggttgcgctggcataatctgacgccggagggcgttattttgagtcatgagcatctggatcatcggggcgggctgcgttcgctacagcaggtctggccgtcaatgtggattcgcagcccgttaggctggcagggacatttgccctgttttcgtggcgagcagtggcaatggcaggggctaacgtttcaggcgcactggccgttacgcgaaagtgccgatcgaggaaataaccgttcttgtgtggtcaaagtggatgacggtgtacatagcatcctgctcacgggcgatatcgaagcgggcgctgaacaaaaaatgctaagtcgttactggcgacatcttgcggcgacgtttatccaggtgccgcatcatggtagtaatacgtcgtcgtcgctaccatttattcagcgcgtacatggtgaagcggcgctggcgtccgcatcgcgctataacgcatggcggctgccgtcccgcaaggtaaaacagcgctaccgacagcaggcgtatcagtggtttgatacaccccaccaggggcaaatttcgctgcggttttctccgcagggctggcgcatacaaggcttacgggatcaaattttacctcgctggtatcatcagtggtttggcgtgtccgaggataacgggtagaatatgcggctatttcaacaaatgctggttttttgaatgcataacgataaagatctctctacgtggcagaccttccgccgactgtggccaaccatagcgccttttaaagcaggtctgatcgtggcgggcatagcgttaattctcaacgcagccagcgataccttcatgctatcgctcctcaagccattactggatgatggtttcggtaaaacggatcgctcagtgttgctgtggatgccgctggtggttattgggctgatgatattacgaggcatcactagctatatctccagctactgtatttcatgggtgtcaggcaaggtggtaatgaccatgcgccgtcgcctgtttggccatatgatgggaatgcccgtcgccttctttgataaacagtctaccggtacgctgctgtcgcgtattacatacgattcagaacaggttgcctcttcttcatctggcgcgctgattaccgtggtgcgtgaaggggcatcgatcatcggattgtttatcatgatgttctattacagctggcagttgtcgatcatcctggttgttttagcgccgattgtgtcgattgcgattcgcgttgtctcaaagcggttccgcagcatcagtaaaaatatgcagaacacgatgggacaagtgactaccagcgctgaacaaatgctgaaaggacacaaagaggtactgatttttggcggtcaggaagtcgaaactaaacgctttgataaagtcagcaataagatgcgactgcaaggcatgaaaatggtctctgcctcgtcaatttccgatcctatcattcagctcattgcctcgctggcgctggcgtttgtcctctatgctgcgagcttcccaagcgtaatggatagcctgacggcagggaccatcaccgtggtgttctcctccatgatcgcgctgatgcgtccattaaaatcgctgacaaacgttaacgcgcagttccagcgtgggatggcggcttgtcaaacgttgtttgcgattctggatagcgaacaggagaaagatgaaggtaaacgtgtcattgaccgcgcgaccggcgatctcgaattccgcaatgtgacgtttacttacccgggccgtgaagtgccggcattgcgtaacatcaatttgaaaattcctgccgggaaaaccgtggcgctggtggggcgttccggatcgggtaaatcaactatcgccagtctgatcacccgtttctacgatattgatgaagggcacatcctgatggatggtcacgatctacgcgaatacactctggcctctctacgtaatcaggtggcgctggtttcgcaaaacgtgcatctgtttaacgacacggtcgccaataacattgcttatgcccggacggaagaatacagccgcgagcagattgaagaggcggcgcgcatggcctatgccatggactttatcaataagatggataatggcctggataccatcatcggcgaaaacggcgtactgctttccggcggtcagcgccagcgtatcgcgatcgcccgcgccttactgcgcgacagcccgattctgatccttgatgaagctacgtccgcgctggataccgaatctgaacgtgcgattcaggcagcgttggatgagctgcagaaaaaccgtacctctctggtgattgcgcaccgtctctccaccatcgaacaggcggatgagatcgttgtagtcgaagacggtattatcgttgagcgcggcactcatagcgagctgctggcgcaacacggcgtttacgcccagctacataagatgcaatttggccaatgattgcgcgtatctggtcgggtgaatccccgctatggcggttactgctgccgctctcctggctgtatggcctggtgagcggggcgattcgtctgagctataagcttggttttaaacgcgcctggcgagcgccggtaccggtggttgtggtagggaatcttacggctggcggtaacggtaaaacccccgtagtcatttggctggtggaaaagctgcaacagcgtggcgtgcgcgtgggggtcgtttcccgcggctacggcgggaaagctgccgcttatccgctgctcctgacgccggagacgacaaccgcagaagcgggagatgaaccggtattgatttatcaacggaccggcgcgcctgtcgcggtagcgcctgaacgcgccgcggcggtgaaagcgattctggcagcgcataatgtgcagattattatcaccgacgatgggttgcagcattaccgactcgcgcgagatattgaaattgtggtgattgacggcgtgcgccgttttggcaacggctggtggcttcctgccggtcctatgcgcgaacgcgccagtcgcctgaaaaccgtagacgccgctatcgtgaatggcggcgtcgcccgggcgggcgaaatccccatgcagctagcgcctggactggcggtgaacttacgtacgggagcgcgttgcgatgtggcgcaactgagcaatattgtggcgatggcgggcatcggtcatccgccgcgctttttcgccacgctggaagcctgtggcgcgcatccgcaaaagtgcgtcccgctggccgatcatcaaacgctcgcccctgctgacgttcaggcgttggtcggtgaagggcagaccctggtaatgacggaaaaagacgcggtgaaatgccgtgcttttgccgaagataactggtggttcttaccggttgatgcgcgtttgtccggtgagcagcctgataagttgcttcaacatatcacctcgctggttcgctagcgtcccccaatgcagcggcagtgatgaatttatggagtcatgaatgtcattgccgtacctttctctttcccaggcccgttgtcttcaccttgctgcgcaggggctattgaaaaagccgcgccgtaacgcgctgcctggcgatgttcttgccgccatctcacgcatggcgttgctgcaaattgataccatcaatgttgtcgcacgtagcccctatctggtgctgtttagccgtctcggctcgtacccgcaggcctggctggatgaggcgctgcgacgcggcgagttaatggaatactgggcgcatgaggcctgtttcttaccacgccgtgactttaaacttatccgccatcgtatgctgtcgccggaaaagatgggctggaaatatcacgcggcatggatgcatgagcacgcggaagaaatagaacagctggtgcggcatattcaggagcacggtccggtgcgttctgccgattttgaacatgcgcagaaaggtgccagcggctggtgggaatggaaaccacataaacgccaccttgagggtttatttaccgccggaaaagtcatggttgttgagcggcgtaattttcaacgtgtatatgatttaacgccccgtgtgatgccgcactgggatgatgaacgcgatggactgtcacagtcgcaggcggaaaacctgatgctggataatagcgcgcgcagtctggggattttccgtgaacagtggctggcggattactaccgcctgaaacgtcctgacctgaagggatggcgggagagccgggcggaacagcagcagattattccggtcgaggtggaaacgttggggcggatgtggcttcatgccgatcttctttcgcagctggaaccggcgctgaataacgccttaaaggcgacccatagcgcagtactgtcgcctttcgatcctgtggtatgggatcgcaagcgggcaacgcagcttttcggatttaactatcggctggaatgttatacgcctgcggcgaagcgccagtacggttattttgtgctgccgctattatacctgggccgtttagtcgggcgaatggatgccaaaatgcaccgtaaaacgggggtgcttgaggttatctcgctgtatctggaggacgatattcgccctggcgttagtctgcaaaaaggaatctggcaggcgattagcgcgtttgctgcctggcaacgggcatcgcgcgtgacgctgggacaatgtccgccaggcctgtttagcaccatgcgtcatggctgggaaatagaccctgcaccctaaccgattatgttaatattgaaggattcacaatccggtccatctggaggaactatggatcatcgtctgcttgaaatcatcgcctgcccggtatgtaacggcaaactctggtataaccaggaacagcaagaattaatttgcaaactggacaatctcgctttcccgttacgcgacggcattcctgtattgctggaaaatgaagctcgcgccctgacatctgatgagagtaaatcatgagtttcgtcgtcatcattccggcccgtttttcatctacccgactgccaggcaaaccattagtggatattaatggtaagcccatgattgttcatgtcctggagcgggcgcgcgaatctggcgcggaacgcattattgtcgcgaccgatcatgaagacgtggctcgtgcggtagaagcggctggcggcgaagtgtgcatgacgcgcgccgatcaccagtccggcaccgaacggttggcggaagtggtagagaagtgcggattcagcgacgataccgttattgtgaacgttcagggcgatgagccgatgatcccggcggttattattcgccaggtcgcggaaaatctggcgcagcgccaggttggcatggcgacgctggcggtgccgattcacagcgccgaagaagcgtttaacccgaatgcggtaaaagtcgtgctggatgctgaaggctatgcgctttacttttcccgggcgacgattccctgggatcgcgatcgctttgcaaaaagtctggaaacggtaggggatacttgccttcgtcacctgggcatttatggctatcgcgcggggtttatccgccgttacgtgagctggcaacccagcccgctggaacatattgaaatgctggagcaactccgtgtgctgtggtacggcgaaaaaattcatgtcgccgtcgccaaagcggtgcccggcacgggcgtagacaccgccgacgacctggagcgcgtgcgcgctgaaatgcgttaacatgatcctgttcatgatcgtcttagacggtcatgaacagcgcggtatgatagcgcaaagatgaatactcacgtctgctcatcagtggcggctttctcgtaccgttacgattttcctcatttttcttttcttcccttgatctgatacgggtgacatctgtccatacgacgctcattattaaagcagtagcactaatgggggtaatctggaatggaacagttgcgggccgaactcagtcatttgttgggtgaaaaacttagccgtatagagtgcgtgaatgagaaagcggattccgcattgtggtcattatatgacagccagggcattccgatgccgctgatggcgcgaagttttaccactcccggcgttgcgcagcaactggcatggaaaacctcaatgctggcgcgtagcggtacggtgaggatgccggtaatctatggcgtattgacgcatgaagagcatcctggtccggatgtgctgctgctggaacggctgcgcggtgtgccggtcgaggcgccggcgcgcactccggaacgctgggaacagctaaaagatcagattgtcgaagggctgttagcctggcatcggcaggatagccgcggttgcgttggcgccgtagaccatactcaggagaatatctggccttcctggtatcgtcagcgggtggaggtgctgtggacgacgctaaatcagttcagcaataccggcctgacgatgcaggacagacgcattctgtttcgtaccagagaatgtcttccttcgttatttgaagggtttaacgataactgcgtactggtgcatggcaacttctgcctgcgcagtatgcttaaagacgcccgtagcgatcagcttctggcgatggtcggccccgggctgatgctgtgggcgccgagagagttcgaactgtttcgcctgatggataatccattggcggagggattgctttggcattatctgcaacgcgcgccagtggcggagtccttcatctggcggcgttggctctatgtgctgtgggacgaggttgcgcaattggtcaataccggacgttttaaccgtaccaattttgatcttgcggcgaaatcattactcccctggcttgcctgatatgcctttcagccattgccaaagtcgccctaatgtttcatacccagcgcgatcgctgtgcatcagccagaccggggacggaattgcccgctcccagggattgagcggcgaatcgatcgccaactgattcgccggcgcgggaagcggattcagcccggcatgctgaaagaaaatcatcgcacgcggcaaatgcgaggcggaggttaccaacaggaaaggggcgtcgccgatggcctgcttaacggcggcggcttcttcttccgtatcttttggcttatccagcgtaataatatcgctacgcggtacgcccagtgactgcgccacccgcgcaccgacttccgccgtgcttaccgtattggtttttgctacgccgccggtaaaaatcagcctggctcccggattcgcgcgccacagccgaatgccttccgccagccgcggcaagctgttgttaattaaattagagctcggcgcccactgcgggttccaagtatagccgccgccgagaaccacaatatattccaccttttgcggaccctgccaggtagggtagcggttttctatcggacgcagcagatggtcagagacgggttgcaggcttaatagcaatagcgccagccaacctacgctgataaatacttttccggtcttctgaaagcggctaaaccagagcagcgccaggccgacgccaatcatcagcaacatcagcggaagcggcaataacataccgccaatcactttctttagcgtaaaaagcatcctttttggttccttttttaaccatatagcggaggattaacggtgatattacaccagacaggttcattctggccgcggctgtgacaaaatagcggttttatcagataacgcctgagccagcctgtggagagtccgatgcaggatcgcaattttgatgacattgctgaaaagttttcccgtaacatttacggcacgaccaaaggacaactgcggcaagccattctgtggcaagacctggatcgcgtgctggaggagattggcgggcggaaactgcgggtgctggatgccggcggcggcgaagggcaaacggcgattaagatggcggaacgcggccatcaggtgacgttatgcgatctgtctggcgaaatgatcgcccgcgcgcggcaggcggccgaggcaaaaggtgtgagcaaagacatgcattttatacaatgcccggctcaggacgtcgcttcgcatttggaaagcccggttgatctgatattgtttcatgctgtgctggagtgggtagccgatcctgtcggcgtattagaaacgctctggtcagtattgcgccctggcggcgcgctgtcgttgatgttctataacgctaacggtttgctgatgcacaatatggtggcgggtaattttgactacgtgcaggcggggatgcctaaacgcaagaagcgcacgctgtcgcctgactacccgcgcgaccccgcgcaggtgtaccagtggctggaggcgattggctggcagattaccggtaaaaccggcgtgcgtgtgtttcatgattatctgcgtgaaaaacaccagcagcgtgactgttatgagaccctggtcgaactggaaacgcgttattgccgccaggagccgtatattagccttgggcgctacattcatgtcaccgcgattaaaagcccggcgctagccgcagatgcaaggataacctatgagtgaattttcccagacagtccccgaactggttgcctgggccagaaaaaacgacttttccatctcgctgccggtagacagactttcctttctgctggcggtcgccacgttgaacggcgaacgccttgacggcgagatgagtgaaggcgagctggtggatgcattccgccatgtgagtgatgcgtttgagcaaaccagcgaaaccatcggcgtgcgcgctaataacgcgattaacgatatggtgcgtcaacgtctgctgaaccgctttaccagcgagcaggctgaaggcaatgcgatttaccgattaaccccgctcgggattggcatcaccgattactacattcgtcaacgcgaattctctacgctgcgtctttctatgcagttgtcgattgtggccggcgaattgaagcgcgcggcggatgcggcagcggaggggggcgatgagttccactggcatcgcaatgtttacgcgccattgaaatattcggtggcggagattttcgacagtatcgatctcacccagcgcatcatggatgaacagcagcagcaggtgaaagacgatatcgcacaactgctgaataaagactggcgggcggcgatttccagctgtgaactgctgctttccgaaacgtccggtacgctgcgcgagttgcaggatacgctggaggcggcgggcgataagctgcaggctaacctgctgcgcattcaggatgccacgatgacgcacgacgatctgcattttgtcgacaggctggtgtttgacttacaaagtaaactcgaccgcattatcagttggggtcagcagtctattgatttatggatcggctacgatcgtcacgtgcataaatttatccgtaccgcgatcgatatggataaaaaccgtgtcttcgcccagcggttgcgccagtccgtgcagacttattttgacgatccctgggcgctaacctatgcgaatgccgatcgtctgctggatatgcgcgatgaagagatggcgttgcgtgacgatgaagtcaccggggagttgccgccggatctggaatatgaagagtttaacgagatccgcgagcagttagcggccatcattgaagaacagctggctatctacaaaaccagacaaacgccactggatcttgggctggtggtgcgcgagtatctggcgcaatacccgcgcgcgcgtcatttcgacgtggcgcgtattgttatcgatcaagcggtacgtcttggcgtagcgcaagcagatttcaccggactgccagccaaatggcagccgattaatgattacggagccaaggtacaggcgcatgtcattgacaaatattgaacaagtgatgccggttaagctggcgcaggcgctggcgaatccgttatttccggcgctggatagcgcattacgttcgggccgccacatcgggctggacgaactggataatcatgcctttctgatggattttcaggaatacctggaagagttttacgcgcgttataacgtggagttgattcgcgcgccggaggggttcttctacctgcgtccgcgttctaccacgcttattccgcgctcggtgttatccgaactggatatgatggtcggtaaaattctctgctacctctatcttagcccggagcgtctggccaacgaagggatctttactcagcaggagttgtacgacgagctgcttacccttgcggacgaagccaaactgctaaagctggtgaataaccgctcgacgggatctgacgttgatcgtcagaaactgcaggaaaaggtgcgttcttctttaaaccgcctgcgtcgtttgggcatggtatggtttatgggccacgacagcagcaaattccgcattaccgaatcggtcttccgctttggcgcggatgtccgtgccggcgacgatcctcgcgaggcgcagcgtcgtctcatccgcgacggggaagcgatgcccattgaaaaccatctgcaacttaatgatgagaccgaagagagtcagccggacagtggagaggaagaataatgattgaacgcggtaaatttcgctcgctaacgctgattaactggaacggtttttttgcccgcacttttgacctggatgaactggtcacgacgttatccgggggcaacggcgccgggaaatccacgacgatggcggcgttcgtcacggcgctgatcccggatctcacattactgcactttcgtaacaccacggaagccggcgccaccagcggttcgcgcgataaaggtctgcacggtaagctgaaggcgggtgtctgttactccatgctcgacaccattaattcccgccatcagcgggtggtggtcggcgtgcgtctgcagcaggtcgctgggcgcgatcgcaaagtggacatcaaaccgttcgctattcaggggctgccgatgtcggtacagccgacacaactggtgacggagacattaaacgaacgtcaggcgcgcgtactgtcgcttgctgagctgaaagacaagcttgacgagatggaaggcgtgcagtttaagcagtttaactccatcaccgattatcattcgctgatgtttgacttagggattatcgcccgtcgtctgcgctccgcttccgatcgtagtaaattctatcgcttgatagaggcctcgctgtacggcgggatctccagcgccattacccggtcgctacgcgattatttattgccggaaaacagcggcgtgcgcaaggcgttccaggatatggaagcggcgctgcgcgagaaccgactcacgctggaagcgattcgtgttacccaatccgatcgcgatttgtttaagcatttgatcagcgaagccaccgattatgtggcggcggattatatgcgccacgccaatgagcgtcgggttcaccttgatcaggcgttggcgtttcgacgcgatctgtacacatcgcgcaaacagctggcggcggagcagtacaagcacgtcgatatggcccgtgagttgggcgaacataacggcgccgaaggttctcttgaggcggattaccaggcggcgagcgatcacctgaatctggtacaaaccgcgctgcgccagcaggaaaaaattgaacgctacgaagcggatcttgaagagctgcagattcgactcgaagagcaaaacgaagtggtggcggaagccgccgaaatgcaggacgaaaatgaagcgcgtgccgaagccgccgagctggaagtcgatgaactcaaaagccagcttgcggattaccagcaggcgctggatgtacagcaaacgcgcgcgattcagtataaccaggcgatatcagcgctcgcccgcgctaaagaactttgccatctgccggatctaacgccggaaagcgccgccgaatggctggatactttccaggcaaaagagcaggaagctacggaaaaactgctgtcgttggaacaaaaaatgagcgtggcgcaaaccgcgcacagtcagtttgagcaggcttatcagctggtagcggcgatcaacggcccgctggcgcgtagcgaagcctgggacgtggcgcgcgagctgttacgggacggcgtgaaccagcgtcatctggcggaacaggtacagccgttgcggatgcgcctgagcgaactggaacagcgactgcgcgagcagcaagaggcggaacgtctgctggcggagttctgtaagcgacagggcaaaaattttgatattgacgaactggaagcgttgcatcaggagctggaagcccgcatcgcgtccttgtctgagagcgtgtcgtcagccagcgaacagcgtatggccttgcgtcaggaacaggaacagctgcaatcccgtatccagcatctgatgcaacgcgctcctgtctggctggcggcgcagaatagcctgaaccagcttagcgaacagtgcggcgaggagtttacgtccagccaggaagtgaccgaatacctgcaacagctactggagcgtgagcgcgaagccattgtcgaacgcgacgaagtgggcgcgcgtaaaaatgcggttgatgaagagatcgaacgtttaagccagccgggcggcgcggaagaccagcgtttgaatgcgctggcggagcgttttggcggggtactgctgtcggaaatctacgatgatgtcagccttgaagatgcgccgtacttttccgcactgtatggtccgtcgcgccatgcgatcgtcgtaccggatttatcgcaaatagccgaacagcttgaaggtctgaccgactgcccggaagatctgtacctgatcgaaggcgatccgcagtcttttgatgacagcgtattcagcgttgacgagctggaaaaggcggtggtcgtgaaaattgccgaccgtcagtggcgttattcgcgttttccgtcgctgcctatttttggccgtgcggcgcgcgagaaccgtattgaaagtctccatgcggaacgggaagtgctttccgagcgctttgccacgctctcgtttgacgtgcagaaaacccagcgtttgcaccaggcgttcagccgttttatcggtagccacctttctgttgcctttgaggacgatccggaagcggaaattcgccgactgaacgggcgtcgcgtcgagctggagcgcgcgctggcgacgcatgaaagcgacaaccagcagcagcgccttcagtttgagcaggccaaagagggcgtttccgcgcttaaccgtttgctgccgcggctgaatttattggccgatgaaacgctggccgatcgggtcgatgaaattcaggagcggttggatgaggcgcaggaagcggcgcgatttgtgcagcaatatggaaaccagttagccaaactggagccagtagtttccgttctgcaaagcgatccggaacagtttgagcaattaaaagaagactatgcatggtcgcagcaaatgcagcgcgacgcgcgccagcaggcttttgctctggctgaagttgtcgaacgtcgggcgcatttcagctattccgactcggcggaaatgctgagcggcaacagcgatctcaacgaaaagctgcgccagcggctggagcaggcggaagccgagcgtacccgcgcccgcgaagcgctgcgcagccatgccgcgcagttaagtcagtacagccaggttctggcctcgctaaaaagctcttacgacacgaaaaaagagctgcttaacgatttgcagcgcgaattacaggatattggcgttcgcgccgacagcggggcggaagagcgcgcccgccagcgtcgcgatgaactgcacgcccagttgagcaataaccgttcgcgtcgcaatcagcttgagaaagcgctcaccttctgcgaagcggagatggagaacctgacccgtaagctgcgcaagctggagcgcgattatcatgaaatgcgcgagcaggttgtgaccgcgaaagccggctggtgcgcagtcatgcggatggtgaaagacaatggcgtggaacgccgtctgcaccgtcgtgagctggcttatctgtcggcggatgaactgcgctccatgtcggataaggcgttgggcgcgctgcgcctggccgtcgcggataacgaacatctgcgcgacgtattgcgtctgtcggaagatccgaaacgcccggaacgtaaaatccagttctttgtggccgtttaccagcatctgcgcgaacgtattcgtcaggatattattcgtaccgacgatccggttgaagccattgaacaaatggagattgaactgagccgtctgacggaagagctgacatcgcgtgagcaaaagctggcgatcagttcccgcagcgtggcaaacatcatccgcaagactatccagcgtgaacagaaccgtatccgtatgctgaaccaggggttgcaaagcgtctcttttggccaggtgaatagcgtgcggttaaacgtcaacgtgcgtgaaacgcatgccaccttgctggatgtgctttcagaacagcaggagcagcaccaggatctgtttaacagcaatcgtctgaccttctccgaagcgctggcgaaactgtaccagcgtctgaatccgcagatcgatatggggcaacgcacgccgcagaccatcggcgaggagctgctggactaccgtaactatctggaaatggaagttgaagttaaccgtgggtccgacggctggctgcgtgcggaatccggcgcgctatcaacgggggaagctatcgggaccgggatgtcaattctggtgatggtggtgcaaagctgggaagacgaagcgcgcagactgcgcgggaaagatatttcgccatgtcgcctgctgttcctcgatgaagcggcgcgtctggatgcgcgctctatcgccacgctgtttgaactatgcgaacgtttgcagatgcagctcatcatcgctgcgccggaaaacatcagtccggagaagggcacgacgtataaactggtgcgtaaagtgtttcagaatactgagcatgttcatgttgtcgggctgcgtggctttgcgccgcagcttccggaaacgcttcccggtacgcagacggaagatacgccttcagaagcgagttaaatacggcagaaacgatgacgtgcctgatggcgcctcgtttatcaggcaaggccggataagtcggttacgccgccatccggcacaacaagttctgttttatcattagcctggggcggcgaaagccgcctttttctttatctgaaaaatctctccgggtagtgcattttctttaaacttctttacattaggttaggcaaaaacgtaacgaactttatatactggagttaagcctgacgagtgagcaggctgactcgtcatactaaacaaaagcattggttgcggttgacccgcgctgcgggcagcgcagtcatgcggagtatgataacgaaaacagggggcaagggatgttgcttaataagatgtgtggtcgttgtctgtcggcaatcagtttatgcctggccgtaacattcgctccactgttcaatgcgcaggccgatgagcctgaaatgatacctggcgatagcgccgttgccgcgacggatctggctgggccgcagaagcaatcagccgcgacggcgattatggccgggattcagccgctgccggagggcgtttcagccgagaaagtccgggctgatttacagtcgcagcttccttccggctatacgccggtctatatgagccagctgacattgctgtatgccgcgcgcgacatgaagcccatgtgggataatcgcgatgcggtgaaagccttccagcaacagttggcggaggtggcgattgccggattccagccgcagtttaccgcctgggtggcattgttgaccgatcccgccgtaaacggtatggcgcgcgatgttgtgttgtcagacgccatgatgggctatctccatttcattgcgaatatccccgtcaaaggccagcgctggttatatagcaacaaaccttacgcattggcgacgccgccagtctcggtgattaaccagtggcaaatcgcgctggaagagggccagttgccgatgtttgtcgccagcctggcgccgcagcacccacagtatgcgcccatgcatgatgcgctgctgaagctggtggcggactctcgcccgtggccgcagttgaccaataccgcgacgctgcgcccggggcaatggagtaacgatgtgcctgcgctgcgcgaaatattacagcgtacggggatgctggatggcggtccaaagatagccttacccggcgataacactgctgatagcgccgtcgtcagcccctccgccgtggtcgacgaaacatcggtggcgcacgacgaaccaacggcccgccgtagtaagccggctccggcggcacgcgcctacgatcgtgaactggtcgaggcggtaaagcgttttcaggcatggcaagggctgggggcggatggcgttattggcccggcgacgcgtaactggcttaatatgacccccgcgcaacgcgcaggcgtactggcactgaatatccaacgtttacgcctgctgccagcggaactctctaccggtattatggtaaacattcccgcttattcgctggtctactatcagaatggcaaccaggtgctggcttcaagggtgatcgtcgggcgtcccgatcgtaaaacgccgatgatgagcagcgcgctgaataatgtggtggtgaacccgccgtggaacgttccgcccacgcttgcgcgtaaagacattttaccgaaggtgtggaatgacccaggctatctggagcgccatggctacaccgtgatgcgcggctggaacagcaaagaagcgatcgatccgtggcaggttgactgggccaccattacgccatcgaatcttccgttccgtttccagcaggcgccaggcgcgcacaattcgctggggcgttataaatttaatatgccgagttcagatgcgatctatctgcacgatacgcctaaccatactctctttcagcgtgacgccagggcgttaagttccggctgcgtgcgggtcaataaggcctctgagctggcgaatatgctcttgcaggatgctggctggaacgatgcgcggatctcaggcgccctgaagcaaggcgacacgcggtatgtcaatatccggcagaacattccagtaaatctttactatctgaccgcatttgtcggcgcagatggacgtatgcaatatcgtacagatatttacaattacgatctcacagcgcgatccagcgcacaaattgtgccaaaggttgaacaattaatcaggtaaatgaagaagttctggtaaatatgttgtcctaatgtttggcttcaacggggcgtttcgctgtagacccccgttgtggctgggggagggccatcttgacgcgggctttatcggcagttaaggtgcctttcgtgcgccagaagtgcatatacaacaacctttaagtcgaccgggccgttcagaagtctgtgccagccggtatcatgtctgcttaaaggtagaagtgtattaacgataacattgacctgtagacctgattatcatggacaaatttgacgctaatcgccgcaagctgctggcgcttggtggtgtcgctctcggcgccgccatcctgcccgcgccagcgtttgccacactctcgaccccacgcccgcgcattttgacgttaaacaatctccataccggagagtcaatcaaggcggagtttttcgatggaagagcctacattcaggatgaattagcaaagttaaaccattttttccgtgactatcgcgcgaataaagtccgatcaatcgatccccgcctgtttgaccaactttaccgacttcaggggctgttagggacgcgtaaacctgtgcagctcatctcaggctaccgttctcttgataccaataatgaattacgcgcccgtagcagcggcgtagcgaaaaaaagctaccatacaaaagggcaggcgatggattttcatattgaaggcgtggcgctgagcaatattcgcaaagcggcgttatctatgcgcgcaggtggtgtaggatattacccacgtagtaactttgtgcatattgataccgggccggcgcggcactggtaatcagcgaggcttaatcaaaggagcagtatgaactatcgtattattccggtcaccgcgttctcccagaactgttcattaatctggtgcgaacaaacccggctggcggcgctggtcgatccgggcggcgacgcggaaaaaattaaacaggaagtggacgccagcggcgtgacgttgatgcaaattttactcacgcatgggcatctcgatcatgtcggcgcggcgagtgaactggcgcagcattacggcgttcctgttatcggtccggaaaaagaagatgagttctggctgcaaggactgccggcgcaaagtcgcatgtttggtctggatgagtgtcagccgctgacgcctgatcgctggctgaacgacggcgatcgcgtcagcgtagggaatgtgacgttacaggtgttacattgtccgggacacacgccgggacacgtggttttctttgatgaacagtcgcaactgctgatctccggcgatgtgattttcaaaggtggcgtcgggcgcagcgattttcctcgcggcgatcacacccagttgattgacgccattaagcgtaaattattgccgcttggcgatgatgtgacctttattcctggccacggcccgctctctacgctcgggtacgagcgtctgcataatcccttcttgcaagatgagatgccggtctggtaagcagaatgaaaaagcctgcacattgcaggcttttttatcggtcacgccagtcggcagctttttacagtaccgcgacaatggcttcgcacagcggcgccatattatccggggtcatgcccgccacgttcacgcgaccagaagccacggcataaacgccgaactcttcacgcagacgcagcacctgatctttggtcagaccgctgaatgagaacatcccgttctgcttgataataaagctgaagtcacggttcgcgcctttttcctgcaaggtattcacgaacagttgacgcatacgctgaatacgctggcgcatgtccgtcagttcctgttcccagatagcgcgcagggcgtcattactcaggatagtcgcgacgatggacgcgccgtgcgctggcgggttggagtagttagcgcgaatggcggatttcatctggctaaaagcgcgatccacggtttccgcatcggcggcaacgagggtgcaggcgccgacgcgctcattatataagccgaagtttttggagtaggagctggcgacaataagctctttatgcagcgcggcaaaggcgcgcagaccttccgcatcttcttccaggccgcgggcaaagccctggtaagcgaaatcgaatagcggcagccaccctttttcaacggaaagctcagccagaacctgccactgttccagagtagggtcaatgccggttgggttatgacagcaaccgtggaacagaaccacatcgccggcctgtgcttcgctcaggctggcttgtagcgcttcaaaatccagcgtgtgattttccgcatcgtagtaagcgtactcccgaacttccaggccggcagcgttaaacacgcttttgtggttcggccagctggggttgctcacccacacccgttttaccggagtattttttgccaaaaagtcggcggcaatgcgtaacgcgccggtaccgcccggcgtttgcgccgtgcgtgcgcgcttatcgttaatcagcgcgctgcctttgccgaacagcagttcctgagtgcagcgagcaaattccggaatcccgtcaatgccgagatagtttttcgtcgtttcattttccagtaaatactgctcggcttttttaacgctggtgagcaccggtgttttgccggtttcatctttatatacgccaatgccaaggttaattttccctggacggtcatcggcgcgaaacagatcggccaggcccaaaatcgggtcggcaggagcggcggttatgttctcaaacatgacgaggttccattatagttacagaagggaaatccgctatcaggttaacggcagatttacaaaatgccaaccgttagcgctaaaaagcccgcctgtttttgaaagacgcacattttctctaagagagataaaaaaacaggaccgaagtcctgtttttgaggcataaaacaaaggggtctgctgatcagaactggtaagtaataccgacagccgcctgatcgtcggtgccaacgtagctggagctgtagtcgttttcgtccagcaggttgaaacggtagtcaacccatacgttcatgtttttgttgaagtagtaagtcgcgcccgcctgaatatatttcgccagatcggccgagccgccggcgccgttcaactgcttacctttactctgcacatacgagattgccggacgcaggccgaagtcaaactggtactgagcgaccacttccaggttctgcgttttgtttgccatttccacggtatcggtaaccgtattttcaacaatgctcatattgcgggtttcagcatatacggcagccaggtagacgttgtttgcatcatatttcgcgccaacggcccacgattctgcgcgatcgccattaccatcgcgatcctgctgatcgttagtacgcttgctgttgctgtacgctgcggtgacgccaaagccgtcgaactcatatgccatggtgtaacctacgccatcgccattctgagagttaatgctgtggttgtcctgatttttaccctgatactggataccgaaagagagaccgtccaccagaccaaagaagtcagagttacggtaggtcaacaaaccgccagcacggctggtcatgtagttatcagtataggcgccgccccaggtttcgccggagaagtagggggccatatcggtataggattcaacatcataaacgataccgtagttacgaccataatcgattgaacccacttccgcgtatttcaaacccgcgaaagccagacggaccagattcgagttctgctgttcgccttcagcgcggtctgctttagtacggtattcccactgaccgaaaccggtcagatcggtgttaatctgcgtttcccctttaaaaccaatctgggcataagtctggtcggcatttttactatcgccggtcgttgtccatacgtgacgacccacggctttaccgtacagatccagcttattaccatctttattataaatttctgctgcgtttgcggttgcagcagccagcagggcagggatcaccgctgccaggattttgcgcttcatcattatttattaccctcattggtttttttatatgacacctgccactgccgtcaataaattccgtcaataaaactttacagaaatattgatgagagtttggtgtctttatgtgtctgacaggcatctttccattcaaactaacgtttcgctaccgtgaaagtgctacaaagataaagatttggtttcaaaaggaaataatatgtaaacaaatgttgtttttacggaactttgtgaacaacgtcaaacttcccctgagttatcgttttgatttgatcgtttttcttttatatccatgattttattgaatttatttgttcgcgacaccgttgtgcctgaaaaagcagctgacgagctatttcataaaaatagccatttagaagtctggatgtctgaaattgtggtgaaaaattgtgctattagagcagaaaaatctaatccgcaataaaattaagggttaatttttatgtgtaaatattttcgtgaaatatacagtaacaagatgtggtaattcagagggttgtaattaattttatttacttattgataataaaactgacattcaggcgaaaaaaaaggccagcatagctggccttgagtgtgacgtaaaaatcagaagctggcgttgcgtggggtccgtgggaacggaataacatcgcgcacgttttgcacaccagtgacgtaagcgataaggcgttcaaagcccaggccaaagccggaatgcggtacagtaccgtagcgacgcaagtcgcgataccaccagtaatcctctttattcagccccatttcggccatacgggcatccagcacatccagacgctcttcacgctgggaaccaccgatgatttcgccgattcccggcgccagcacatccatggccgccacggttttgccatcttcgttaaggcgcatgtaaaacgctttaatttctttcggatagtttttcaccactaccggcgctttgaaatgctcttccgccagataacgttcgtgttcggaagagaggtcgacgccccagaacaccgggttttcaaatgtcttaccacagcgttccagaatggcgaccgcatcggtgtaatccacctgagcgaagtcggtagagacaaaacgctccagacgagcgatagcgtctttatccacgcgttcggcaaagaacttcatgtcatccgcacgctcttccagaaccgcgttgaagacatatttcagcatggcttccgccagacgggcgttgtcttccagatcggcgaatgccacttccggctccagcatccagaactccgccaggtggcggctggtgttggaattttccgcgcggaaggtcggcccaaaagtatagattttggacagcgcgcaggcataggtttcaccgttgagctggccggagacggtcaggaatgattctttgccaaaaaagtctttgtcaaaatctactctgccctggtcgttacgcggcaggttttccagatccaacgttgagacgcggaacatttcgccagcgccttcggtatcggaagcggtaatcagcggggtagagacccaaaagaaaccctgctcatcgaagaagcgatgcagcgcctgcgccagagtatggcggacgcgcgctaccgcgccaatcaggttggtgcgcgggcgcagatgcgcgacttcacgcagatactcaatgctatggcgttttgccgccatcgggtaggtatccggatcttccacccagcctgcgacttctactttcgtggcctggatttcgaaactttgcccctgtcccggcgacgcgacaaccttacctgttactaccacggagcagcctgtcgtcaggtgtaatacttcttcattataattgggcagagaattattaatgacagcctgtacaggatcaaagcaggagccgtcataaacggcgaggaaggagatgccagcttttgaatctcggcgggtacgcacccatccgcgcacggtgacttcttggtcaacggctacgcggccctggagtacgtcggctacaggcacaacgctcataatattctctctagttaatagtcggaaaaaataaacacttgtccacccgaaatgggggtattcctatgttacctggcatctgcaatcagacaagcagaaatcgcatctggaagcaggttttcagaaagaaacctgtaaaaagttcgcacctgctcgcgaaccattgagaatttaggctggttttgcaagctttgcgcacgttactcgatcaggacgcgcatctcttgcttggcgttttgcatcacgacaatcgttttaaaagactttatattgcctgaggaaaagaaaagctcacgggtaagcgcttcatattccgccatgtcacgaacattgagcaccagtaaaaagtcgaaatcgcccgttacgtagtagacctgctgcacctgcgggcaactgacaaaccgttgacgagcctcttccagtaaattgaatcgctcgttttcgatcaccacctgcaccacaatcgtgaccgggcgtcccactttgccagcatcaataaggctgacattgcctttaattatgcccgcctcctccagtgccgcgatacgacgattcactgccgaaggtgaaagattgacctgttcggcgatttcccgctgagaaagacgattatcgcgctgcaataatgtcagaatgtttttatcccaggcgtcaagcttcatatcgcaaataacctctttaatgtgatgactatcactgtgcgcaattttgccgcgtccaggccgttaaaaaaaggtgaaaattgcacgacgatgggcattttcgcgccatttaacagcaataagcatagtactatcataatcagcggaataaagaaaaggacgtaatagatattgtgcgactcttttatcagtacgtttattaaagtgaggataaccactactacagccacaaaacgcgagttctttgcttgtttctactcaataattgacaaaaatatattatttcaataaataaactttaacaaaaggtatcattatgcatgagcttattaaatatcagtttaatacacgtcggaaaaaatatggtacaggagcggccttaagtttgcttaacggaaatgttgggcatgaggtgttagcatttcataaaaaattacccaattatgccgtcacgccgttacataatctggcgcatctaagccagcggcttggactagggtccatccatattaaagatgagtcctggcgttttggcctgaatgcttttaaaggtctgggcggctcttatgctgtaggaaaatatctcgctgataaattgcaatgtgatattaactcgttaagttttgctgcccttaatactcctgagattaaagaaaaaattaaagattgtgtttttgttaccgcgacggatggcaatcatggccgtggtgtggcgtgggcggcagagcaattaggtctaaaagccgtcgtttatatgcctaaaggatcatcgttaatccgggcagagaatattcgccatcatggagctgaatgcaccatcaccgatctgaactacgatgatgcagtgcgactggcccatagaatggcgcaaacaaaaggctgggtgcttttgcaggatacagcctggacagggtatgaagagatcccaacatggattatgcaaggctatatgacactagcggttgaagcttatgagcagctcgcagaaacaaacagtccgttgccaacccatcttattttacaagcgggggtgggatcgtttgctggcagtgttatgggttattttgttgaaaaaatgcaggaaaatatccctaatattattgtggttgagccgcatcaggccaactgtctttatcaatccgcagttatggatgatggtcaacctcactgcgtcactggcgatatggcgacgataatggccgggcttgcgtgtggggagccgaatattatcagttggcctattattcgggacaacaccagttgttttatttccgctgatgactgtctggcggctaagggtatgcgtatttctgccgcgccgcgtccaggtacggatacgccttttatttccggcgagtccggagctattggcgtagggttactttatgagttgatgaacaatatgcattatcaggatcttgctaatcgcttacagcttgatgccagtgctcatgttctgcttattagcaccgaaggcgatacgtccccagatatttatgaagatatagtctggaacggacgcagtgcttaaacattacgactaaaaaattagataataaaggtagcatgtaaaaatgcgttttttatacgcataataaacctaatgcaggaagcaagactttataacaatataccattaaaacggcatttagtgagtaagggatgctcctacccgctgactttccagtttagtgttgttggcaaaattcaggattacgctgaactggaaagattatttctgagactgaacgaattaatttaaatccgaggtcattatgttagagcaactttcacaactctttgaatttctatggggtggcccattatttttgtgtgtcatcggcattggtttttattttacagtacgcctcaattttttccagattattaatttaaaagacatttaccgtaatacaattggtacacttgccggaaaaaataaacaaaacactactggcgaggtagcgtctaaaaaatccttaaaatcaatagaggtggctgccactgtgctatccggctcattaggcgcgggaacgatcgcaggtgttgctgcggctattgcggttggcgggcctggagcaattttctggatgtggatcattgcggtcgtgggtatgatgaccaaaatggttgaagtgacgctggcggtgaaataccgaagtaaaggtgagaatggcgaatattatggcggcccaatgcattatattaagaaagggctcaataaaaaatggcatcccctggcaggattatatgcgtttgcattaatgattctggttattacggatgcctgttttgtgcaaactaatacgatggcggcggtcattcactatacgtttgacatcccaacaagcgtcatcggaggatttattgtcatcgtaggcgcgttggttattttaaaaggactctccagtcttggtaaattctgtacgattgcacttccaccgatcaccattgcctatttcattggtgccgctggtgtagtggtattgaatatcgaggctatcccacaggttataaaaagtattttctattatgcctttgcccctgcgccagcagccggtggctttgtcgggtcaaccatcatgatggccatcagtaaaggagccagtcgcggaatattcactaacgaagccggcatgggtacctcggccacagtacatgctactgccaacgtggattatgctttccgtcagggaatgtgggggcagtggaagtattttttgtctcaatgattacctgtaactttaccgcatttgctgtacttgcttctggtatgtggacagacgccagttatcaaggtattcagattatctttgccgccttaaaagaaacatggcatccgattattgttcaggttctctgtctcggtgtggcgttgattctgtttacttcttatcttggttcatatattaaatttcgcacttcgataaactatatctttggcgataagctagaacgcatcattaaatggctatattttttgccgccactgattgccgttaatatggaaatcccggtaatctggttaatggctgatattgctgtcggttttctggttatccccaacgtaattgctctgttcttgctgcgtaaagaatttattagcgaattcaatttattcagaacgcgtacacagcgggacactaattctgaaaaaacaacgcaaattacgcacgtaaatatgtcgaagagtgaagggaaagaggagtaaccatcgcggccagaacaggtaagatggtcagaagagtaacaaagcgcccactttccgggcgcttcgcacaggcatggttaacttgctttacgcacctgcgggagatcgaacgctttacgcagcgcgcgcacaaacgctttatcatgacagatcgttttaccggggctgtcggaaagtttagccaccggctttccgttacattccacgagcttaatcacgatattgagcggttttacctgagggatatcgcaggtcaggcgggtaccgatgccgaagcttaactgcacgcgagaggcgaaatggcgatagagctcgaccgcctttggcagatcaaggttatctgaaaagaccagcgtttttgtcagcggatcaatccccagcttttcataatgggcaatcgccttttcgccccatgcgacagggtctcctgagtcgtggcgtaacccctgataacggctggcgaattcaatgccgaaatcgcgtaaaaacgcatccattgtaatgcaatctgtcaaggcgataccaagctggtccggatattcgttaagccaggcggccaacgcggcacgctggctggtcgccaggtccggactgatttgttgatgcgcctggaaccattcgtgcgcctgagtgcccatcggcgtcagcgccaggcgacgcgcgagatcatagttgctggtgccgacgaaccatgactcctgctggagacgtttaactatcgcctgctgcacttcacgagagaaacggcggcgggtgccgaagtccatcaggtggaagcgggacatatcgagattggcggttaacgcagtgaaatcaaccagcttactttccagcgcgtcgagcgcctgatcaacacccgcgtttggcgagcggtagtgatgaaccagctcactgatcacggccagcagcggcacttcccacataatgacttcacgccacgggccggttaagcgaatattcagcttgccgttatcgttggtgacacagacttgagctgggttatagcgaaactcgcgtaaccagttcagataatccggtttaaaaaagggcaggccggagagccactggaactcgtcctccaggaggcgcaggtgctgcatcgcgtccacctgctcgcgaatagcatcggcataaatacccagcaggtcgtcgccacggcaacgaaactcagccgctacctgcacatcatagtagtggtgaaaaacggcttgctgcatatgcaacttataagcatctgtatccagcaacgagtgcagaacaggagaagcgaattgtgtcataggtgcgctgttgcgtcctctcacgggagcgtttagtacaataaacaactaagaaaaccgctggagtataccttgtttagcgatttattgaaccccgatcacaccataagctgtctttagggtcgagcgcatttcgtgccccatgttataaaaatgtagcgatgcgactgctaaccccttgaatttaaggatttctactgcgctgctaccatgctttggggcagtgatggggcatagcggaaaagttcctggttgagcagagaaacctgttctgcgctcttctctgacatccactttccatacaccttgtaaaccatctgtgcatcggtatgccccatctgcgttgctataaagtttgggttagcaccagctgataatgaccagcatgcataggtatgtcgtgactgatacgcgttacggtaacgaatgccggcacgcttgattatcggggcccaaattttattaatggaattaaccgcgtagtgatatcctgtgcgaggtccacgtttgacgcattgagggctgaatacgaacgtgcagggctgaatgacagattgtccatattcccgcaacttcacttcaacctcaaactgccggccaaggcgtgtcaactgggcctgattcctcagggcatcaatagctggttgaatgagatatatcaccctgtcagtacctgcgtcggtttttggcagggtgaactcatccgtctgggtaaggttgcgcttcacaatgatcgtcccggcatgcagatcgatatcttcccaggccagaccgcacaactccccatgcctcattccggtatagactgccagtgaccagagatttctcatctgctggtgtccgcatgcctggataaacctgatgaactcgtctgtcgtgagtggatctggttcccctttcgctttcttgagacggttaattccgctaaacgggttttcctttgcatagccgttatctgttccaaactggaagatctcggccatcagcatcatgtaattattcactgtggacgatttccggcctttaacctgagtccggtgatccttcttcattacctgaaagcccgtcagcaactccttcctgacatacagcaaatcctcagtagtcaccgcagaaaccattttgttttcgccgatgagtggaagcatgttttttatgatagattcgtacctactcatggtattagagctgatctccattctcttcagctcggaccatctttcggtaagctccagcacagtaatttcctttctatcctgaccgaaccgggcaaggttcggtgagtttgggaatttttccacatagttaaaattccccatccttatcgcaaaacaaaccgaagaacgcagttcgccagctatcttgcgattttttgcagtgtcagggataccaaggttttccctgacacgtttacctttatacagaaaccagatgcggagcgaaccgccgtggttttcgacgcctgtcgggtatgatgcattagccattaatccctcctgacgtccaggagcattgacgagtgtacagcttttcatgttgtcttcgcacctggttgattttttttctgcgcctcgatccactgatcaacggcttctctgttgtatatgcattcgctcgaaggcttcggatttccgtctggtgaaatgtgcaggtactcgcggcccagcatccaggattcttttctggcgcgggtaatggttccgggcttaagcccggtaaccgcaatcagaactttttcgctaacccacttgtttggcgtcagttggataatgttgctcatcgttttctccagtggccccgcagcgggccatcgctaatattcagtttgcctgtgctggcagatttctaagtttccggacgccgatcattgcggtggctacgtagctggtggcccggttaactacttcaacaggcacctttacgccatccactacaacggtgtaattggtaacgtgcttttgtctgccgtaatcgccgaacttttcatgatgcgccgccagtgcaacatcacatgcgcgacggcccaatggcgattgcttactgcgatttataaggcgcataaaacctcctcaggcgggagggcgtaacccctcccgatgcaattagccgatgtattccggtttcatatcgtccagggtgacgcggtacttatcgtgcagttcgtcgccaagatggcgtttagcagcgccaagcgtgctttcagctttagcaaacatctctgcggcttccggttcgccagggtttggaattgagttgatcactgcctcgactttgttctgtgcatcgacctggtaatagcgcttcactgctttgttttttaattcggtgaacagcgcagtacccagcaacgctttctgtgattcgatatccgcacggattgcttttgcctgatcaacggaacttgctgtatcaatgcgttcgcgaagatcgtcggcaacagcatcaacgttagctgccgactcctgcgcgctggtcctggtgctaacctcgctggtgatttcctgtacgctcatgcgctggactggagcagggttaatctcgcgttcttctcgttgctcaacctcatcagggctgtacacgccgaggatcacttccgggcagtacaggcgagcccaatatttaacgcccagataggcaatttgctgtttagggtttgaaacccatagcggagaattgcgggtaacaacgccggagaggtaaagaggttctccccaggtgatttcagattcacctcgcagaatggcaccaacctgaacgaacaggccgatctcgtcctcatctgtccagccacgaacgcgctcagtgacggtgtacttcccatttttaccgtttttatcgcgtgtgatttcctgtgtcctggtgcagcgctcccagtcacccccatagcggtaatgaaaacggccatgaatggcactggagcttgcgattactgcgttgaccagttgtgcctcgtaaccaagaacaccgttaaccaggtgtgttttctgagccacagcgtaagggttcatgccccattgcatagcctgcatgacgatagccatacagtcggctggtttccctgcaaggtgtgccggtaccgtcacctgtgagtctgccatcaggttagcgaaagctgttaactgacccagtgcctgaacgttaaaaattgcgttactggcagaaatggtgtttggtgcctgctgctcagtggtaacaatatttgtgttttccatgattttccccttatgcctgtacgcgcaacgcttcaaggcggcgcacatcaaaatcgttcagttcgtcggtgtagtcttctgtgataggcgctgaccattcaccagtgtcgaagccgtttgctatctctcgcattgttttgcggtattccagcatgccaagttccagcaactcggtagacgcctcaatgatggcgacccagtggtagttctcgtctttgttgacgaaaatccagaaaaactggtccagcgccgcagtttcgcagtacatggccgcgctcaggtgatagtcccgatcgatgatttcccggtgcaacttcgcacgcaggccttcctgcttgatgttccacatgctgatagttttcaggtcggcgccaatgcgcaggccgcccatatcgagctcaaggtcagggcgtacccgaacttccaacccggtttcctcatcaatcccaaaatagctaacctcgacagcgcggcttgggtgagtcagcaatttgccggcggtcgggtgctccagcagggctttctgaatgttcagcgcggtgctgagctgttggcgggtgaccagcactttcccttcggtgttctcccgccacgcatccagcaattcgtcggcgaataccactgccgggttgactgatttcacggcctgaatcagatcggccttcgtgccagagactttcaacggcgacgatttttgcgcttcctgagcgaccaggtcagggttgattattgccagttgctccagcagcgcgtcacggctgccgctggttttaaccggcgcgggcagggtgacgttgtactctttgatgcaggctttcatcgccgtggctgtatgtttggtgccgttttcaatgcgctggaattcttcgggaagctgctcatacgatgcataggtttcatctaccgaagctccaagcggcatctgcgacggcagggtggcgttgtactcttccagcagcgctttgatatcgtcagcactcagcagcgctggcaggctggcgttgtgcgcgtcgatgaactcgcgcagggtggcggtggtggtgaaagcaccctcagggatctccggctctacgctgaactccgcttcgaggttttccggctgtagagccagagcatgtaccaggttgcccatatcaagcactggagagcgctctttgacgatagttttctctacgtgacgcgcgttaaagtacatcagcgacacgcgagcatctttcacctgagttgagctgatcccattggcggcgtggtaaacttcgtttggtacaccttcatagcggcccggctcgaagtattccggccaggctgcttctggctcttcttgttgcgattccggtacgttttgttgcgcctcagcctgattctggttctctacggtaactgcttctttaccagtacccagatcgtcttcgcctgcctgcaccgcatcaccagcctgtttttcatcactgtcagctttttgaacctgcacattgctggtggtctccggattcgtttctgtgccatgagttgatgagttctgcattaaagcggacacgtcgaaaataccgttgccaacatttttaaccagttcaggttcggtggtcggctggcttgtcccggttttcacccattttgggtcgttcgggtcgctgatgccttccacatattcaccgcgcgcggcggcaagctgtcggttggcttcttctaccgcgtctttttccggagtgtgtcgggcagccgtgagagcttcctcggtggggttctcgtgatcagtctccgttaagttggcgttgatatacccctgaaggcgtccggggtagtgataaaactcagggtgtgcgcttcggatcagcgcgaaaatagcggcgcgggaataatccaggataccgggcgttgcgcgaagtgctgcggaccattctttgaacggactttcctttttctttacgatttcttttgcgcgacggtaaacgctgccaggtagctcatagatattaaagtccataggcaaagtggccattgcaatctctacgtccagagtatcgagagtgtgttcgtaatcagggttacggtcagtcttattgccaccgccagcgttggcgccgctttcagtgcgttgaatagccgatacacggttgcctttcgcccactccttaacgagcaaaccgcgatcgatatgctccgtctcgaaccatgttttaaggaactggataacagtcgccagttcaggagtttttccatcgacagggaatacttttttaacggcattcactattttgtgaatgtcatgttcaatggctttcttgaacgcttcaacattctcggcggcaagcagcaggttctggacatatgaattatcggtgtccatttcgagacgcagaatttcttttttctgggaggcgtcgacgtgataaagatactcaccttcacctatgtactgagcaagaacgcggtgacggagaggcatagttgcgacaacagtcagctcgggggctggggctgttgcctgggcagggctgttgctttcgttaccaaaattttcggtgtggtcttccagcacttcgcctgtttcggtatcaacaccatcgacgatatgctggcgcgccgcggcggcggcttcagatgatggcagggtgacgccggggatttgcgtccaggtcatattgtctttagcgagttgatagtaatcgcagaaagtgaggctcagttcgccttccggcggcagctcgttaacgacagggaaattagtagcgacagctttgaaataatctttcagcttcgcaccggatttaatcagaagataatccagtgttgcatttgccgcttcaaaatcatcactgcaccagagtacagcgtctttctggcctgatgatttctttgctttgcggactaaaaatacaggattagttccactcattgttttgtcctcaattcgtgtagaatggaggtgccttaacagcaccccgatatatctggttgttaggtccggttcgctttggtcggttggaccggacagggcacgcccgcttcggtgggcgttttcttaatggatggtctgataaaatttttctgagtaatcaagcttgtaacttcggtaattaccaaaccctgcttgttctccatcacttaccttgactgtgagcagcgaaatggcttttacagcacaatgaggactgtcgaactttccgagtacatatccaccgtcgagattttcgcaattgaataaagcaatgctcttattaactgctttcaggttcatttcgatttttacgatttccataatttctccagtcttaaattcagggtgtatgaagccacgccaaattaatggcgaatttttcatttcatatttcggatctactatttaactttcgtgcgccatctggtcgtattcagcacactgcctggaacaatattccttttctttgctcgccagttgcgagccgttgcgatagagaagtgtgttttttacttctttgccttcatcaatggatttgcggcagtaaccgcattgtttaagcatccggatctcctttctgcgccagcaggtagcagaggcggcggattaaaacctcaatccggttgagcgggacagcctgctgtcgagctggtctacgtgcgaaatcaatcattctcaccctcgtttgccttatcgccggccagcggaacgttttacacctgacaacgatgcgcttgttgtcgatgaaactaacgataaaaccaaaggttcgatttgtaaagcaaaaagtgcaactaaaagttctattttggagcataaaaatagcacctaaagaggtgctacctgtatggatgagttctttggttctattttttgaggtcgttaattagatcaaaaacgttgttcttcagcagatccatctcttggaggactgcttttgtatggaggataacacgcagtttctctgcttccgggagttgattgaaaagagaaagcaatgtttcttctttttcatcaaggactctgggtttaggttcagccctttcgccttcactttcatcccctggctccatgaagaaccaatattcaggccttccggtcaccgccgataaccttttcaagcgctctccgctggctacagacgtgccagaggcccactttctcacagatgtgtgagaaagcattacgcgccgtgagaggtcagccatagaccagccgttctcatccagaacttgctggatacgcttggcgaaaatgggatgaagatttttgttcatattcacattttacaaccttcagtttctttattcattggaactattagattgatttttgttggaacctaaagttttacgtgataatctccagctaccaactcgtagaactggagagccaaatggacaaccaattaaaaatcaaaatcagtaaccacatgactcaaatgagcatcggcgaacattttggtatctcgtctcaagctgtaggcaagtggctgagaaaaggagtaattcctccccgtcgcatcctgccgttatgtgaaattcttgaatggaaagtcactcctcacgagattgacccagcagcatacccaaacccaaccgatggcttaccaagccaagaggcatcagccaaataaccatagaggatatttacccatggagaacgcaattgcacgaaagttagacccaccagaaatcaacccgattgagatagagagcgtcctgctcaaccggcttgcatcagtagggcagaaatcatacgccgagcatatgggcatcagcgagtcgacagtcagcaggcgtaaagctgagggatatttctgcaacatggcgaaagagctggcttttcttgggattcaggccgcgccaccggaagcggtactggtatccagaaactatctcacagcagtagagattctcgctgatgccgggctaaaggctgaacgagccaggccggatgcgctggggtgggactgaaaatggcagcaactaaaaaggcgaaagccgcggtgaggggtcaccaacggctttctggtgcaaaaacggtaggtaattgcggagatgagtatgtcaaataccgctgaaatatacaaattccctgcgccgataccgacgcaacaggagtgccgtatggctgatctggaaaatggctatttacgtttagctaatcagatccaggacgccttgtgtatcgttgaactatcggggcgtgagttccgtgttttgaatgcgattatccggctgacttatggctggtcgaaaaaatcagatcgtattgccaacagcctcattgcagataagacaacactgaaggtaaagcatgtatccgaagcggtgctgagtcttgcctatcgtaacatcattatcctgcgccgtattggtcaaacaagatacatagggattaatacaaacctggataaatgggcttattccaagccacattgctcaaaatgtccggtgtcttttcctgatgatgaaattgccacatggattatttctgtacctgaaaccagggatagttatccccgaaaagggggaagggcatccccgaaaacggggatagttatccctgaaaacagggatagcgttttaccccattcagccatccctgaaaacggggatagttatccccgaaaagagggaagggcatccccgaaaacagggaacaccaaagacattattccaaagacaaatataaaagatctaaccccctttaatccccctaagggaaaagtgaagtttgatccgttgagtattcctgttcccgaatggctgaatgctgcgtcgtggaacgaatgggtcacataccgccagcaatccggaaagcccataaaaaccgaactgacggtaacaaaagctttcaggcttctgaaggagtgcctggatgaaggccacgatccggtaaacgtcatcaacacaagcattgccaacggctaccagggactattcaaaccgaagttcgctctcaacgaccgaagagctggcagagatgtgaaccacatttctgcgccagacaaaaccattcctaccggattcagggggtaacgatgaaaaacgtaatcggtactggcagtgcgcttgatcgcctgaaaagaattatcccagccagtgtgcagccgaaattctcgactgctgatgagtggcgggcatggcaggaagccgaagggcgtaaacgcagtgaagagcttgacaggatgaatcagaaatcccgcaccgagaagattttcgggcgatctggcattcaggatctccatcgtagctgtacgtttgctaactacgaagtaagcggggaggggcagcgaaaagcgtacacgatggcaaaaagttatgcccagaacttcggtagtggatttgcgagctttgtgttcagcggtggtccgggaaccgggaaaaaccatcttgcggcggcaatcggaaatcatctgctggccggcggtcatagcgttctggtggtaactattcctgacctgatgctcagggttcgtgagtgctacgacggtgggcaatcagaagcgtccctgcttgatgacctttgtaaagttgacctgctggtactggatgaagtcggtattcagcgcggaagcagtggtgagaaggtcattctcaatcaggttatcgatcgccgtctctcatcgatgcgacctgttggcgttctgacgaatcttaaccacgaggggctgttggattcactgggcacgagggttatcgatcgcctccagatggacggagggatgtgggtgaattttgactgggaaagctaccggaaaaacgttagccacctccggattgtgaaataaggggttaaaaatggcccgacctaaaacacaaagcgaacggatgattattcttgagcggattatcggtctggtgaaagagcaggggcgcatcacgacgaacgacgtcgttgcgatttttggcgtgcaccgaaccacggcggagaaatatctgcgtatcgcgctggagcgaggcggcttcattcgtcatggccgctgcggcattttccgagaccagcgtgcggtgattgattatgacctcaggcgatacagcagtagtcaggtaacgggattttcagcgctgccggtgctggagaaaagcccggtaatgcaggtttatggagcatccaaaatgagcatcaacaaggggggagcccaatgagcaacatcgacaaacgggcgcttcgtgaagtggctgagagggctacgccggggaattggcgccgcacctcatcactgttcaatggcatcacggtaacgccattttctctttgcggtgaagaagtgacgttggcccatactgttgagaaacgtgacgcggaatttattgccgccgctaaccccgccaccgtgctggcgctgcttgacgtgctctatgagtttggagaggatgaggtggccatctctgaatacgtcacaaatcttgaagatgctttgcgagttgcggcagcacctcagcaggaggaatgatagctggttaaatccacagcagaaagcaaaagcattattaggtacaatcacactaactttttgttgttaattatttgatgaattacgaggataagctcatgtatcagcgaatgatttttgaagaaggaaaagagccaaggttgtattcaagccaacatgactccaagtttatcccaataagtaataacaatggaaaagttcaaaaggttcctgttatggagttcaaggataccagaggagatgttttttatgcttacaactatgcttattctggtaaaaaaccatcaaatgacgaaatctataaggctattgatgagctaaagccaatcggtgaaaaattcgaaatgtctaagactataagcgattagataaatctgttttcaacattgcagcaaaatcacaggaagatcgagacaaagttagcatggcgatatatggaaatgtcggagcagaacaccaagaagtaagcgtaatttgaatgaatgtgaacccgccgagtacgggttttcttttatctgaacccgctgcggcgggttttttgcctaaaatgtgatatgaaacaacacactagcctttgcaaaaagtgctattcaccccttgaatattctttctaacaggtatactgtgtttatatacagttgttgaatgtagagggaattatgagaattgaacttgttatcagccgggcaaaacagcttccggaaggtgccgttcctgcgcttgaaaaagaattaattacccgtctccagaatcagtatgaaaactgcaacttaaccatccgtcgaggcagtcaggatggtctgagtatcgtcggtgctgctgatggcgataaaaaacgtatacagagcattctgcaggaaacgtgggaaagcgctgacgactggttttattaacattgcgcttaatgctggcgcgcatttttcagaatatcgcaatttgcgtatccctttgatgctgctgccgacaatttttaaccgcgtccgtgtgtcgctcaggggggttacgtggcagagggagtcctatcagatcttgctgataatttgcgggtgactataactgatgctaagggaatagaacttttgtcttttagacttgcatcaggtgatcgctatatcctatcaacccaaaacggttctgtaacaaaccgaaagctatcaagagatgatttgtactggtctaaggataccattatggaagttgtcagagagatgggctctaataattgacttaacaataagcacgcaatcataattatcgcactggcctgaacaaccagtaacctgacaattatgcgccacggagaataccatggcgcacgaattacaactcatcaagcagtcatctggaattctgatccccgctacgccggagaccagcgaaattctgcagtcaaaaattaaactcggtgccgtgctggtggctgagttccgtcaggttaggaatcctgcattccatcgccgctttttcgcgttgcttaatcttgggtttgaatactgggaacccaccggcggcaccatttctgccaatgaacgcaaactggtaaacggttatgcaaagtttctcgctgcatatggcgggaatgagagcgcattactggatgcggctgaacagtatctggaacagattgcaaaccgccgggtaacaaacggaattagcctctgtaaatctttcgatgcataccgcgcatgggtgacggttgaggctggccactatgacgccatccagttaccggacggcacccttcgcaaacatccccgcagcatcgctttttccagcatggatgaggtcgaatttcagcagttgtataaatccgcgcttgatgtgctctggcggtggattttatcacgtacatttcgtactcagcgcgaggcggagaacgccgccgcccagctaatgagctttgcggggtgatggcgatgaaatactcctggttccatcatcacgactgcacaaccgagcaggccgacacgctgatatcggattatcagaagcggggcgtaaggacagaaaagagcctgaaccctgacttcattacctggactgtcagcgcgaaattacctgaatatgcacaccgggtgcggacgccaaaatccttacgccaaaaggtctgggggtgaacatggctaaattaccgcgccgtaagtgcgcaaacaaagaatgccgccagtggtttcacccgatacgcgaggggcagatcgtttgctcgtaccagtgcgccagcgccgtcggcaaagaacagaccagaaaagctcgcgaagccgcgcaacgtaaggcgcaatcccttcagcgcgccgctgagaaaaaagaacgcgccgcctggcgccagcggaaagccgcggttaagccgctgaaacactggattgacttgacgcagcgcgccgtaaatgacatttgccgcgaaaccgaactggcagaaggactcggttgcatctcctgtggaacgaagacggcattcgcatggcatgcaggccattacaggagtacggccgccgccgggcatctgcgcttcactcgcttcaacatccatcttcagtgtgatgtctacaacgtctacaaatcagggaacatcgaagcatatcgtgccgcgctggttgagcgttacggggaggcggcggtgctggcactcgagaacaataacaccccgcaccgctggacggtcgaggagctgaaggaaatcaggctcgcggcactggcggatctgcgtgcgctaaaaaagctggaggccgcatgaaaccagaactgatcgagatactccgcatgcgctggttgcgtctccgaatttatcgataccggggatcttttcctgtggcatatcgcattcttcgtaattacgtccgcattgaagcaaaacgggagcatcgaaatgaatcttgagtccttaccgaaatatttttcacctaaatccatgatgcccggcgcagtaccatgcggaataacgtctgatacgctgactattactgacgtaatggcatctctcgggctacttactgcaaaagccgcagtgggtattgaattgtatctggcaaaagccggggttttatcttctgaaaatatcatcgcctacatcaggcaattagcagagcagcgtgcagaacggcatggggcattacggaaaatggaaaagggtaagcgctcaaaatttctcgacactatggcgcgttatgtatttcgcgattattccctcagtgcggccagcttggtgacgtgcagtagctgtcatggtgctaaattaattgatgctgaggttttcacgaacaaggttacttacccggatggtaagccaccaaaatgggtaaaagatacgaaaggtatttctccgtccgactgggaggtgtggaaatcagttcgtgagcaggtgcgcgtagtgtgtaaggcgtgtgatggcaaaggccatgtgaaaaatgaatgtcgttgccggggacgcggagaaattctcgataagaaaaaatctgagttgcagggcgtgccggtttataaaaaatgcccaagatgcaagggaagaggctacccacgtctcaaagataccgagatttttaaagcactaggagtaacggaaatggtatggcggtacaactataaactgtttttcgatcggctggtggagcattgccatattgaggaatcgtatgcagaaaaggttctgggaaacgtgactcgatgaccaaaataatttagctattgcaaaattaacggaaaatggctaatctgattccaacgatgggttattatgcctgtgacgttacaagaattaagaacctcgcctcggcggggtttttgttttttttggtggtatattcccttggtgtcaaatcacagggggggcgatatggggttctattacgtttttcaatacaagccgaaagggatgtcgtcgggtaagcatttaaatgtttccgaggagttttcggaccggaatgaggcaaagagagcgaagtccaggcacatgattaatgatccagattgtgtcttctcgggaatcgtgcaggctgattcgccggcagcggtacttcaagaagtacaggctgaatctcttaataggctttaacggatttaacttggcagtatccacattaccaatttcattaggtcgcttcggcggcctttttctttttcaggcaccgggcatcatccgctacgtgcttggttgataaatccagcccgtgaagcctgcccctttcatcacacactgcgccatccgagctatcggaggtgaggcttatgaaaatgcacaacgatccccattcaatggactcacaatctatttttgctggctcacaattactgccaatggaaaaaacttctcatttggctctgagcgtcggatttcgctctcacttagcgtgagtccacgtccgatttcagttgcagttattgtgagccaaaatttgcgctgattgcgagtctgacttttttcgattgtgagtcgttacagatagccgccgggccagacaccacaacggtaccaggtggcgttatgtgctagaaaccgaaattcttgaacatctcattactactcatatcgttggctggcgcacggttcatcgactccatctgcttaatcaaccctatgctagcaccaacaggccccccgacgctgaaaccgacgctgctggagcgggttttgctggtgctactgctgtgggtttgactacgggtgttacagttgctttggtgtgtccgtgtgagaccattttcgttgagctggctatcttcactttgggtgcagtttccctgtgactggctgtgactgtctcctgtggtgtggttgcggctatccgtgtgccactcgctatagcctcccgccggcgcaatgattccgaccgatgtaccgtgggtggcatagggaggcatgaccatgccactacagccaccgagcagtaacgcggtgccgacgataaaaatgaacttacccagagcggtgtttttcattagttcctacctatttcttctcgttggttatttctatgccctgccttggcagggctcgctattattcattcttcaactgtgagatcaagttattttaattaaatcggtattattcttaattgtgttctttatgaataaatatcctccggctatgccggaggatatttattatttcctctcataactgagaggccccacacaaccagagggggatgaatgtccgaatcgatttctggtactgggttagcaggtggcatcctgacaggagccagtgtctatggactgctgacctgtattagctcagacctgaactggttactgtgttgtagcatcgtgggattttgcattttttgatgagtgtcaattactaaattcgtaggcgattcttggtggtgatgtgtgacccatctcttttaaaatgatattggtatactcgactaccgggcctcttggattactgtcttctttgtcctgaaggtgagtcaacgcgtgtacaacttcatgaataaatgagcgtgttgtatcaaattgttgtgggccatcattactttcatagtactctggtattgaatcatcgtctgtatcatccaggttgagggcaatcacttttctgccttctgaactctccaggtcctcatcagttacggtagtaccaaagttttctccggctcccagcaaccagcgttgttctacatcatgcaattcctggtcgtaggcataattcatcagtctgcggaatgtcccgctttgagtgtatgcatcttcaagtatgcgtgatagcacctcacggcattcatcataggtatcatcatcaatttcgatatcaggatccattcctcctggtccagagataaggtattcagcaagacacattggttccagcctggctttatcatcggtagcaagaccatcatgttggaggcgtaattgcgaaggattatcttggtgttctggaaggtctggaaataccttgctgtcatgaggatgggataatccatatgttgacatcatattattgataaatattggtttaattcccgttggcatgatgagttacacatcctttttattacatggaattaacattctataaatagcatgtttttgtcaaacagaattcactcagcacgcaatcaattaaactaaaagctaaatttgcagtatttgtgcctcacctccattaaaattgtactctgcgtgattttactttcagattctgcaaccacaggcaatcctgttttacaagatattaaaccctgcaacccaaccatttcactcactctagttaccatccgaaatcatcggaggtgaggcttatgaaaatgaatgacaagactcctgaattctgggctgcggttttgaccggactcaaaaatgcgtggccccagatacttggggcgttaatggccggactcattgcctacggccgactgatatacgacggcgccacccgtaaaaataaatggcttgagggcgtcctgtgtggcgctctttccttatgtgtcaccagtgcgcttgatgtggtaggcctgccggtttccatttcgcctttcgttggcggaattattggctttgtcggtgtggacaagctgcgcgaaatcgcaattagcgcactcaaaaaacgtgcaggggttaatgatgagaatcagtgaaaaaggcattaccctaatcaaagagtttgaaggttgtagcctgacagcttatccggacccgggaacggggggagatccctggacgattggttatggctggacccactctgttgacggtaagccagttaagcccggaatgatgattgacgaggctactgccgagcgcttgcttaacactggtttagtcggttatgaaaatgatgtgtccagactggttaaggtcaagttgacgcaaggccagtttgatgcgctggtgtcgttcgcgtacaacctcggcgcccggacattatcctcatcaactctgctgcggaagctaaacgctggtgattacgctggcgccgctgatgagttcctgcgctggaataaggctggtggcaaagtactgaacgggcttacccgtcggcgtgaggcggagcgtgctctgttcctgtcatgatgttcaactggaaaacgatgtttgttggcctgttgcttgtctcgctaattgttgccggtcggctggcaaatcactaccgaaataacgccatcacctacaaagagcagcgcgataccgttactcataggctgacgctggcgaacgcgacaattaccgacatgactaagcgccagcgtgacgttgccgccctcgatgaaaaatacacgaaggaattagccgatgcgaaagctgagaatgatgctttgcgcgatgatgttgccgctggccgccgtcgcctgtacgtcaacgcaacatgccccgcagtgccgacaggtaaatccacctccaccgcccgcatggataatgcagccagccccagactggcagactccgctcaacgggattatttcgccctcaaagagcgagtgaagacgatgcaaaagcaactggaaggggcgcaggcgtacattcgcacccaatgccacggtaatgcaggaaaaactagtaaccaatggtgactgtattaaaaaggtactcccgggcagggggcgccacgggtggcttcgggctcgcgggaatcggctgatttttgattttttagtctctgtcagcactgaaaaataaccttaaaaatcaatacatttactgttttcagtgtcgaagtggtacgttttttgttcgacactgaacgccattttcaccgtatacaggaaaagagcacgactgtggatcaggaaattaaaagcctcgaattaaacatcacacagctttcggccatcactggtgcacaccgacagaccatcgccagcaggctgaagggcgtaaaaacctcaggtgggaacggtagtaacctgaaaatctaccggctggtggatattctgaccgccatgatgacgatgccggctgttaccggggagaatgaccccaataagatgaaaccctcagatcgacgggcatggtttcagtcggaaatgacgcgtattgagctggaaaaggagatgagaactctgatcccggccagcgaggtgctgagcgtttatgctgtcatggcaaaaacggtcgtcaagacactggagatactgccggacttactggaaagggatgcggcattgccgcctgatgcgctggaaatgacgcaaaaaattattgatcaactcagggaagatctggccagcatgacataccaggcctgcgcggatgctataaacggagatgatgatgacaacggtgacgaagggcaagaggaagagcaggaatagtttagcctctgccgttgttgccggatgtgatatctcatcgatgttcaggccgccgcgcaggatgaaaatatcggatgcggtcagaaaatatatgcgcgtaccacgcgatgcgggaaattctgtggcatgggaatccaccctgaccccctatgtggtggaagccatgaactgcctgtcatcacgcagctacgatgccgtggtatttgtcgccccggcaagaaccggtaagacgctggggctgattgacggctggatttcctacaatattgtctgcgatccgtctgacatgctggtggttcagatgactcaggacaaggcgcaggagcactcaaagcggcgtctggcaaagatgtttcgccacagtccggcgatagcaagaagactcagccctcaccgtaacgataataatgtgcatgataaaacgtttcgtgatggctcgtttctgaaaattggctggccatcaatcaatgttttttcgtcttcggattttaaatgtgtggcgctgactgactacgatcggttccccgaagatgttgatggtgagggggatgcattctcgctggcgtcgaagcgtaccacaacgtttatgtcgctgggtatgacactggtggagagctcgccggggcgggaaattaccgataccagatggaaaccgtcatcaccgcacgaagcaccgccgaccacaggaatactttccctgtacaaccgtggcgatcgtcgtcgctggtactggccgtgtccgcattgtggcgaatattttcagccatcaatggcgaatatgaccggctatcgccatattgccgaccctatggaggccagtgaagcagcgcggattcagtgcccacactgccataagttgactgaaccacagcagaagcgtgagctgaataatcgtggcgtctggttgcgggaaggtcagcacattgaccgcgacggcaatattaccggcgaagcccgccgctcacgtatcgccagtttctggatggagggaccggcggcggcttatcagacctgggcgcaactggtttacaagctgctgaccgccgaagaggaatacgaacgaaccggcagcgaggaaaccctgaaagccgtcatcaatacggactggggattaccctatcagtcccgtcgctcgctggaggcacgcagcggtgacgcgctgatggcacgcgctgaggacgtatcaaaacgtaccgtttctgacggggtgcgttttattgtggcaaccgttgacgtacagggcggtaaaaagcggcgctttgtggtccaggtagtgggctatggcgcatatggtgaacgctggatcattgaccgctacaacatccgttattccctgagagtgaatgaggatggcgaaagccagcctgtcaatccggctgcaagaccggaagactgggatttgctgaaaacggatgtgctggaaaagacgtatccgctggcggcagatcctgaacagtttatgccggtactggcaatggcggtggactcaggcggtgaagacggtgttaccgataatgcctacgcgttctggcgaaggtgtaagcgaaaaggcgttgccgggcgcgtttatctgttcaagggagacagtacccgacgcgagaagctgatcaccaaaacctatcccgataacaccgaacgctcagaacgtcgggcaaaagccaggggggatgtgccgttgtatctgttacagaccaatgccctgaaagacagggtagctgccgcactggagcgtgaggagccgggggcgaattacattcattttcctgactggctggggccgtggttctacgaggaactgacctatgaagagcgcagcgcagacggaaagtggaaaaaaccgggacgcggtaataacgaggcgctcgatctgatgtgttacgcccacgcgctggctattctccgtggctatgagcgaatcaactgggaaaaaccaccaggatgggctcgcttaccggaaaaagacgccgcaaaaaccacgcagcctgttgaggttcgccagcaggagcaacacgaaggaggagagaaagccgtgaaagccaggaagaaaaaaattttacccgcctggggcggtggttccggaggagggtggttatgaccagggcagggctacaggagttgtacaacgcctatctggaggccgagcttgctgtactgaaaggcaagtccatcatgcttaacggtcagtcaatgacaatggaaagcctggaggaaatcaggaaggggcgccgcgagattgaagacaggttacagcggttaaataatccgcgacggcttttcacccgggcgaggttgtcatgaattttatcgataaagctatcagcatgatgtcgccgggatgggctgtatcaagactccgatcgcgggcagtaataaaagcttacgaggctgcaatacccacccggacacataaaattaagcgtgaaaaccgcaacgccaatcaactaaaccagattgccggaaagtccctgcgggagcaggcccgctggttcgataacaatcacgatctggtggtgggggcgctcgataagatggaagagcgcgttatcggggctaaggggatcatcgttgagccacaaccactgacggtggccggaacgctgaataacgcgctggcggaacaaatccgcgccagatgggcagagtggtccgtgtcgccggacgtgaccggacaatatacgcgcccggtactggagcgccttttgttacgcacatggttgcgggacggggaggtgttctcccagatggtggcgggaaaaatgccggggcttgagccggtggcgggcgtaccgttctggcttgaggcgatggaaccggattatgtcccgatggaacagacggacagtacaaataatctgattcaggggatctattttaacgactggcaaaggccaaaaagttacatcgtctgtaaatcctggccgggatttgccaccgctatggtggccaccaagcttatcgatgcagaaaatatgctgcatcttaaattcacccgtcgcctgaatcaggcgcggggcgtcacgctgctggcgccggttattatccggctgctggatctgaaggagtatgaggacagtgaaaggctggccgcgcgtatttcggcggcttttgccatgtttatccggcgcagtgacgcaatggtacaggatggtgacgcgccagattatgcggataaagaccgcgatctggatattgaacccggcaccattctgaaagacctgttgccgggagaggatatcggcaccatcaaatctgacaggccaaatgccaacctggagtctttccgtatggggcaactgcgggcggttgccgcaggtgtacgcggaagtttttcttctattgctagaaactacgacggcacctacagcgcccagcgtcaggagctggtggaggctcaggagggatacgccattctacaggataattttattgctgccgtcagtcgcccggtttaccggcgatggctggcgacggcgattacggcgggtgtgatagatgtgccgacggacacggacatggcgaccctgtttaatgccgtgtattccggtccggttatgccgtggatagatccgctgaaagaggcgaatgcctggaggatactgatacgcggcggggcggcaacagagagtgactgggtgcgtgcccgtggcggcgcacctgctgaagtgaaacgccgccgtaaggcggaaattgacgaaaaccgtaagctgggactggtatttgatactgatccggcacatgacccgggggaacaggataatgccggaagtgaagacaacagtggcggcgataaaaatgccgccggtgatgacagcagggaacggacgcggggagggaagcagtaatagctggtattccatcagggctgcagccaataacacggcggaagtccgcatttatgacgagattggtggatggggaatttcggctcgctggtttgcagaagaactggctgcactgggacagattaaccggataaatctgcatattcattcacctggcggagcagtactggacggaatagccatttataacctcctgaaaaatcatccggcgcaaaaaacggtgtatatcgatggaatggcctgctcaatggcatccgctattgcgatggtaggtaatcccatcattatgccggaaaacgccatgatgatgattcataagccgcgcggagtggcgggggggaggcggaggatatccgggaatatgctgacctgcttgacaagatcgaaagcgtcattatccccatctataccgaaaaaactggaaaaacgcctgaagatattgctgccatgctggcaaaggagacctggatgagcggcgcggagtgcgtcagtgaagggtttgccgacaaactgatacagcctgtaaaagcaatggcctgtattcattcaaaacgtgttgaggagtttgagcatatgccacagagcattaaaggtatgattatcgccccgcagggcaatgcaggcgcgcaaccgcagccacaggcaaaagcccctgagtcacagattcagtcgcaggctcagtcgctggtgactgtagatgaaaatgccattcgcgcacgcctgcaggaagaacagcgtaaccgtatcaccggcattcagaatgtgttttcactttccggcgatcgttatgcctcgctgatggcaaagtgcattgctgatgtggattgctctctggaaatggcgaaggacagactgttggccgagatggcgaaaggtattacgccgactaaccagctgaatggtccgcagaatcgcgcagagtttcatgccgggatgtataccggaaacggtaatattaccggcgacgccgttcgcgctgccgtgatggcccgcgcaggctatgaagaagcgcagaaggataacccgtacaactgtatgaccctgcgtgaactggcgcgaatttcgctggtggcgaggggtacaggcgtgtccagcatgaatcccatgcagatgatcggcatggcatttacgcacagcacctccgatttcggtaacattctgctggatgttgcaaacaagtccattctgcagggctggcaggaagcgccggaaaccttcgatgcctggaccaaaaaaggacagttgtctgatttcaggattgcgcaccgtgtgggtatggggggattcagttcactgcgtcaggttcgtgaaggagcggaatacaaatacgtcaccacaggggataaacaggcgaccattgcgctcgctacctatggggagctgttcagcattacccgccaggccatcatcaatgatgatatgaatatgctgacggatgtcccgatgaagctgggacgtgcggcaaaagccaccattgccgatctggtttatgacgttctcatcagtaaccagaaactgtccagtgataatgtggcgctgtttgacaagacgaaacacgcaaacgtccttgaaaaagccgttatggatgtggcgtccctggataaagcgcgccagctaatgcggatgcagaaagagggcgatcgccacctcaatatccgtccggcatttgtactggtgccgacggcgatggagtctgtttcaaatcaggtgattaaatctgtcagtgtcaagggggcggatattaacgccgggatcattaacccggtgaaagatttcgccacggtgatcgcggagcctcgtcttgatgacgccagtcagtccactttctatcttactgcagcaaaaggcagcgataccgttgaggtggcttaccttaacggcgtggatgagccgtatatcgaccagcaggaaggattcacggtggatggcgtaaccacgaaagttcgtattgatgcgggcgttgcgccggtggattatcgcggcatggtgaaatgcaccgtataacccactaaaagcagacattaagcgatacggccctgacgggctttttttatacctgaaatccggcacggcgtgccggaaaggagaataaccgtggctaagaattacgtggaagacggcaaaacgattgaaattgtggcgaccacgtcactaaagagcggagatctggtacaggtcggcgatatgttcgctgtggctgttaccgatattgccgccgggagcgccggaaccggcatcgcagaaggggtattcagcataccaaaactgacaacagaggatattgccgtcgggaaaaaagtgtatctgaaggataacgtggttcagacggatgcaaccggcagcctgccgtatgtcggggtggtatgggcgccagcggcaaacggtgatgaaaccgttccggtaaaaattaatggctgacctttttgacgggatgaaaaggcgcatggatgcacttatcgcagaacgcttcggcatgaaggtcaacatcaacgggactgactgcatagtggtggagtctgattttctggctgaactggggcctgttgaaggaaacggaaaaaacgtagtggtgttttcaggcaacgttatcccgcgccggggagacagggtggtactgcggggcagtgagtttaccgtgacccgtatccggcgttttaacggtaagccacaactgactctggaggagaacaatggaggtaaaggggcttaaagaggccatttcagtacttaaagaacttgatcgtggatatgtgacccgggcaaaaattcgggccattaaccgggtggcaaaacgggtggtcagcgtgtcagttcgcagtgctgctgctttggtggtggccggagacaaccgacggcagggtattcccgtcagaacggtaagacgtcgcgccagagtcaggctggccagagcggacaagccttttgccaacatttatgtgaactgtgatccgctgactgccatcaggttactgagttcgccaccatcaaccccgatgagggggagaaaaggtaagccgctacgtataggaaaataccgttttgaccgggggtttattgcgcaggctccgaacggatggtggcaggtatttgagcgttccggtgccggaagatacccacttaatgtggtgaaaatcccggttgctgatgcattgcgccatgcgttcaacacgcaggttgttttacagatgaaaacggagatgcccaaagagctgaagcatgaaatcagttatgaactgaggagattcactaaaaaatgacccgacacagtgcagtacggcaggccattattgccgcattaaaaaagaccgatgatggctccaccacgttttttgacggtcgtccggtcgtggtggaggaggatgagttacctgcggtggcggtgtacctgagtgatgctcagtataccggtcctgaggtggacggtgatatctggagcgcggtgctacatgtggaagtatttctgaaagccactgcaccggacagcgccctggatgaacagatggagaacagggtgtatccggcactggggagcgtggcgggactgggtgacatcatccggacaatgtcggcgcaggggtataactatcagcgagacgatgaaatggcgatgtgggggtcagccgatctgagttacgacatcacctattccatgtagaggaaaagagaatgacagacacgacaattcctaatccacttgcgccggtaaaaggcgcaaataccacattctggatgtacaacagcgagggtgatccgttcgccagcccgctaagtgataataactggctgaggctggcaaacgtaaaagacctgcagccgggagaactgacggcagatgcagaagataataactatcttgatgacgagaacgctgactggaaaagtaccacacagggacagaagtctgccggggatacttctgtgacgctggcgtggaagccaggtgaggacgtacagaaaaagcttattcaactgttcacgaccgggcagaagcgcggattccggatcaagtatccgaacggcactgttgatgtgttcagaggctgggtgagctcgctggggaaaacggtgcagagtaaggatgagatcgcccgtacagtaaaaattaccagtgtgggccgtccgtacatggctgaagaggatgcaccggaagtggttagtgttaccggactgacagtggaaccgacaaatgccaccgtgaaggtcggcgccacaacagcggttacgttcacggtgaaaccggataacgtgacagataaatcactgcgtatcgcaacgtcagatccgactacagccaccgtcacgcaggcggaaaatattgccactgtaaaaggtgttaaggcaggtacagtgaaaattattggcatgacaacagacggtaattttaccgctattgcggatattactgttcaggcataacccacctctcgtcctgttttggggcatttttttcaggaataaatcatgtttttaaagaaagagacgtttacccggggggatgcgtcggtggcattgttcgagttatccggcctgcaacgtattgagtacctggagttcatccagaaacgtactgcgaaatatgacacggatatggatggtacgacggaagcggataagcgcgtggcttatatgcaaatggcactggaaattaatgcctggctggtatcccgctcgcttctgaatggtgattcttctcaggatgcagacacgctttatcagtcagtacaggcgaagtggtcgtatgaggcgctggacgcaggcgcagaaagtgttctgatgctcagcgggctgtctgcggataagaaagataacgccagtgattcaggtaatgaatcagaggacatgacgccggaaaagtcctgaataatgagcttcattttgtccggcaactggcccgggagttccggcggcctgactggcgccggatgctggacgaaatgagttcaactgaacttagtgagtgggctgatttctttcgggaaaacagtttcagtgatgccctgctggatgcggagttttccacgctgaaagcgcaggtgttcatgctggtgacggggaaagaaatcgatgcagcggacttcagtttgctgacattacccggagcggtacagagcatgacggagcaggatctgcttgaagtggcagtcggtattccgggaggagtgagatttgagccagaaagtcggtgatatcgtcatcaacatggatgttgatacagctaaagttgccgccggtcttcagactgccagtaacgggctggggaagctggtggacagcagtgatctcgttgaaaaacgcatcaagcgatgtatggagtccagcgccagaagtgtggcggcatcggcaaaaagtatcagtgccgctatggcgcaatcacaggttgccacacgcacacagagtgacgctatggcacaactggcgcgtgaggcgaacgaggccagagaaagggctgtcgacctgaatcagaagttaagggcggaagctgcgcaggcagcggtggttgcacaggctcaggatgcagccgcagcggcattttaccgtcagattgacagtgtaaaacagttaagcggtggtctgcaggagttacagcgtatccaggcgcaggtacgacaggcgaaaggacgcggagatatttcacagggcgattatctggcgctggtgtctgaagctgctgcaaagacacgcgaacttaccgatgcggaggcgctggccacgcagaaaaaagcacagtttatacgtcgactgaaagagcagacggcggtacagggcctctcccgtactgagttgctgcgggtgaaggcggctgaactgggggttagcagtgccgccgatgtctatatccgcaaactggataccgcaacaaaatccactcatgcactaggactgaaatcagcaatggcgcgccgcgagataggcgtactgattggtgaactggcacggggaaattttggcgcccttcgcggttccggtatcacgctggccaaccgggccgggtggattgagcaactgatgtcgccgaagggcatgatgctcggcgggctggttggcggtgtggctgcggcggtttacggactgggtaaggcgtactatgagggggcgaaagaaagtgaggagttcaataaacagcttattctgaccggaagttacgccggaaaaaccacaggcaagcttaatgaaatggcgaagtcgctcgccggaaatggcgtcacgcagcacgacgcggcaggagtactgacccaggtggtcggtagcggagcgtttaccgggcaggcagtggcaatggtatcccgtaccgcggccagaatgcaggaaaacgtggggcagtcagtggatgaaaccatccgccagtttaaacggctgcaggatgatccggtgaacgcggcgaaagaactggacagggcactgcattttctgactgccacccagcttgaacaaatcagggtgctcggtgaacagggaagaacggctgatgctgcgaaaattgccatgtccgcgtattcggaagagatgaataaacgggcgggtgacgtacatgataatctgggctggatcgagaaggcatggaatgccgtgggtgatgcggcgaagtgggcgtgggatcggatgctggatatcgggcgggaagatacgctcgatgaaaaaatcgcgacactgcaggaaaaaatcgcgcgcgccagaaaaacgccatggacagtgtcttcctcccagactgaatatgatcagcagcaactgaacgaacttcaggaacagaaacgccagaaggacctgctggatgcgaaggcgcaggcagagcgtaattatcagaagactcagaagcgccggaacgagcagaacgccgcgctgaaccgggataatgaaactgaatccctgcggcatcaacgggaggtggcgcgcattaccgccatgcagtatgccgatgcagcggtacgcaatgccgcgctggagcgtgaaaacgaacgccataaaaaagcaatggcacggcagaaggaaaagccaaaggcttactacaacgacgaggccgggcgactgcttttgcagtacagccagcaacaggcgcagactgaagggctgattgccgccgcgaagctttccacgaccgaaaaaatgacggaagcgcataagcagcttttgtcatttcagcagcgcatcgctgatttgtccggtaaaaaactgacggcggatgaacaaagcgtactggcacataaggatgaaatagcgcttgcgctacagaagctggatatctcacaacaggatttgcaacaccagaatgcctttaatgaactgaagaaaaagacgctcacattaaccagccagctcgctgacgaagaatcccgcgtcaggcagcagcacgcactggcgctggccacaatgggtatgggcgatcagcaacgtggccggtacgaagagcatctgaaaattcaacagcactaccaggaacaactggagcagcttaagcgcgacagcaaggcaaaagggacatacggttctgacgaataccgtcaggcggagcaggaacttcaggccagtctcgatcgccgactggctgagtgggcggattataacgcgaaagtggatgctgcgcagggagactggacgcagggcgcgtcgcgggcgctggataactttctggcgcaggggggcaacgtggcaggcatgacggagaacgttttcacaaacgcatttaacggcatggcggacagtatcgcgaattttgccgtgaccggaaagggcagtttccggagcctgacggtctccatcctggctgacctggcaaaaatggaggcacgtattgcggcttctaaactgttgggttcagtactgggtatgttcgtctttggcgcatcagcaggcggaagtacaccatccggggcatacagttcagcggcgctgtcggtcattccaaatgcggacggcggcgtgtaccgctcagcaggactcagtcagtacagcggcagtattgttaacagaccgacgttctttgcatttgccagaggggcggcagtaatgggagaggccggtccggaggctatactgccgcttcgtcgcggtactgacggtaagctgggggttgtggcagcaggttccggagggatggcgatgtttgcaccgcagtatcatattgcaatcagcaacacggggccggaactgacgccgcaggcgctgaaggcggtttatgatctgggtaaaaaggcggcggctgatttcgtgcagcagcaggggcgtgacggcggcaggctgagcggggcatatcgatgatgaaaacctttcactggaaagttgacccggacatgggggtggattcggaaccacaggtgtcggtggtgaggttcggtgatggctacgagcagcggcgtgcatccgggatcaataatgacctgaaaaaatacagtgtgactatccgcgttgaccgggaggatggtccgggactggagggctttttgtcacagcataacggtgtgaaggcgtttttgtggactccgccttacggataccggcagattaaggttgtctgccggaaatggagtgtgaaagcgggattgctgaaaacaacattcaccgcgacatttgagcaggttatttcttagtatttttgatcgaaacgatcgataaatatgattgaactttctaacctgctgctgtttcactgagcccgcacagtcaataatcaaaaaaaggaaatgttatgaaaaagattgtcgtggcggttttagttggtctggcgttaggtagcatcggcgtggctaacgcagcagggtataaaaataccgtttcaattggatatgcctacacagatttaagcggctggctttccggtaatgcgaacggtgccaacatcaaatataactgggaagatctggacagtggattcggggcgatgggttcagttacatacacctcggctgatgttaataactatgggtataaggtaggtgatgctgattatacctcccttcttgttggtccttcataccgttttaacgactatctgaatgcttacgtgatgattggtgcagcaaacggacatattaaggataactggggaaattctgacaataaaaccgcctttgcttatggggcaggtattcagcttaacccggttgaaaatattgccgttaatgcgtcttatgagcatacaagtttttccactgatgctgacagtgacgtcaaagctggaacctaggtgcttggcgtaggttacagcttctgacctttaacatcgatacagatttaatgccctccagtgagagggcttttttatgggtaaaacgaaattatgacgatatggctatgttgctgttatttctcaatgacaccacaggcaaaacgtgcaccgccaccacccagtggagcaggtttatcggagtaattgtcaccgcctttatggatcatcaatgagtgacctttcagttctgacagtgatttaaggcgtggtgccagtaacggatacgtggctgtaccatctgcattgacaaccagtccaggcagatcccccaaatgccctttgtcattatatgggccaagatgtttcccggttttttcggggtcaagatgtcctccggccatgagcgccggaacctctttaccgtctttcattcccggcatacaacttgggtttgtgtggacatggaagccgtgaattcctggcgtaagaccatttaggtgaggagtgaaaagcagaccgtaaggtgtctctgaaactgtgatttcacctatgttttctcctgttccgctggacagggcatcgttcatctttacagtcagggtattctctgccattgctgaacaactgatgagcgcaccagctaccagcgacaatattgtgtatttcattagttacctcgttttttggttgtatcgtaaataccattaataaaagcaggtatatgtttgcaagataaataataaaggatctctcatatatgcaggatataccacaggaaaccctgagcgagaccaccaaagcggagcagtccgcgaaggtggatttgtgggaatttgatttaaccgcgattggcggtgagcgctttttcttctgtaacgaaccgaacgaaaaaggcgagccgttaacctggcaggggaggcagtacgaaccgtacccgatacaggtacaggattttgagatgaacgggaaaggcgcatctccccgcccgaacctcgttgttgccaatctctttggtctggtcacggggatggcggaggatttgcaaagtctcgtcggcgcgtcagtggtaaggcatcaggtttacagcaagtttcttgatgcggtgaatttcagtaacggcaatccggacgctgacccggagcaggaggcggtagcgcgctataacgtggagcagttgtcagaactggattcatcaactgctaccattattctggcatcaccggcagaaaccgacggttctgtggtgccggggcgtaccatgctggcggactcctgtccgtgggattaccgggatgaaaactgcggatacgacggcccgcccgtggccgatgagttcgataagcccacctcagacccgaaaaaggataaatgcagccactgcatgaaaggctgtgaaatgcgtaacaatctggtgaatgccggatttttcgcttccatcaacaaactgtcttaacaggttcccatgattaacgatgacattctggcacatgcccgacagtgtgcgcctgcggaatcgtgcggttatgtggtcagaacggcacagggagagcggtattttccgtgtgaaaatctgtctgctgaacccacgatgtattttcgtatatccccggaggattacctgaatgcccggaaccgcggcgacatcgtggcgctggtacacagccatcctgacggtaagccctgtctcagcagtgcggatcgtaccctccagatacaaagcgggctggactggtggctggtctgtgataacaggatacataaattccgctgcgtgccacacctgaccgggcggcagtttgagcatggcgtgacggactgctacacgctgtttcgtgatgcctaccatctggccgggattgatatgccggatttcgatagggaagatgactggtggagtcagggtaaaagcctctatctggatcacctggaggcggcgggattttaccgggtgaatccggaggatgcgcagcccggcgacgtgctgatttgctgttttggttcaccgacgcccaatcatgcggcgatttactgcggcaacggtgaactgttgcaccatattccggagcagttgagtaaacgagaggggtataacgacaaatggcaacgacggacacactcaatatggcggcaccggcaatggtgcgaatctgcctttacggggatttacaacgatttggaaagcgcatcagcctcagcataaagacagcggcggaaggcatacatgcgctggcgatacaactccccggattccggcagcgaatgaatgagggctggtatcaggtccggattgccgggagcgatatggcgccggatacccttactgccagactgaacgaatcgttaccgccgggggcagtggttcatattgtaccgcgtatggcgggagcgaaaaacggtatctggcaggtggtagccggggcagcgctgattggcgcgtcatttattcccggtctgaatgctgtagcggcggcagtattgttttccgcaggaaccagtatggcgctgggtggtgtggcgcagatgctgacacctgtacccaaaacaccgacggtgggtcaggcagataacgggaaacagaacacgtacttttcttccctggaaaatatggtggcccaggggaacccggtgccggtgttgtacggtgaaatgaaaatcgggtcacgggtgatatcgcagatgatgagtacccgggatgagagcacgtcgggaaaagttgtggtgatcggctccccgttacaggcaaacaccacgtcgcggcaggacggcgggattaccagaccgtctgtcgtcatccggcagtgataatcatgacaacatgagctgatacacatgaccgccattacggcggttttgttatttatggagccaggagaatgagcaaaggtggagggaaggggcatacaccacgtgaggcgaaggacgatctgaagtccacacaacaactgagcgtgattgatgccctcagtgagggaccgatagtcggcccggtgaacggtctgcagagcgtgctgattaataacacgccggtggtggacgcggacggtaacagtaatattcacggcgtgaccgtggtatatcaggtgggggagacaccacaggcaccgctggaaggttttgaggcttccggcgcggaaacggtgctgggtgtggaagtgaaacacgataatcccgttacccgtactgttgtctcagagaatgtcgaccggctacgcttcacctttggtgtacagatgctgcaggagaccacggacaagggggaccgtaacccgtcctccgtgaatctgctgatacagtttcagcgtagcgggatctggaacacagaatttgatatcactattaacggcaagatcacaacacaatatctggcatcggtagtggctgataatttaccgccgcgcccgttcagtgtccgcatggtcagggtgacaccggacagcaccaccgacaggcttcagaacaaaacgctgtggtcgtcgtatacggaaatcatcgatatccggcagggttatcctggcacagcggttgccggtctgctggtggatgcggaacagttcggcagccagcaggtcacgcgtaactaccacctgcgcggacgtatttttcaggtcccctcaaactatgacccggatacccgcacatataccggcctgtgggacggggcgtttaaaccggcgtacacgaataacccggcgtggtgcacgatggataaactgacccacccccgttacgggctgggcaggcgtatcggggggcggatgtggataaatgggcgctgtacgccatcgcgcagtactgcgatcaaccggtgccggacggatttggcggcacggaaccccgcatgacgcttaatgcgtatattaccacccagcgtaaggcgtatgacgttctggcggatttctgctcggtgatgcgttgtatgccggtatggaatggccgcaaaatgaccttcatccaggaccgcccctccgataaagcatggacctacaccaacggtaacgtggtgggcgggcgctttaaatacagcttcagtgccctgaaagaccgccataacgcggtagaagtgagatacaccgatccgctgaatggctggcaaacctccacggagctggtggaagaccatgcctcacaggcccgttatggacgcaatctgctgaaaatggacgcgttcggctgtacctcacgtggacaggcgcaccggacggggttgtgggtgatgatgacggagctgctggaaacgcagaccgtggatttttctgtcggtgcggaaggtctgcgtcatacaccgggcgatattattgaggtctgcgacaacgattacgccggggcgtcggtcggtgggcgtatcactgacctggatatttccacccgcacgctgacgcttgaccgggaaataacactaccggaaagcggcgccaccacgctgaatattgtcgggcctgacggtaagccgttcagtacggagattcagtcgcagcccgcaccggatcgggtggtaacgaaagtcctgccggaaaccgtgcagccatacagtatctgggggctgaaactgccctccctgaagcgccgccttttccgttgcgtgcgtattaaggagaatgacgacggcacatacgctatcactgccttgcagcacgttccggaaaaagagtccatcgtggacaacggggcgcactttgacccgttaccggggaccaccaacagcattattccgcccgctgtgcagcatctgacagtcagcacggataacgacagtaccctgtatcaggccaaagcgaagtggggcacgccgcgggtggtaaaagatgtgcgttttgtggtgaggctgaccacaggcagtgggaacgagggcgatccggttcgtctggtgacaacggcgacgaccagcgaaacggagtacgccttccacgaactgccactgggtgactacacgctgacagtcagggcaataaacggttacgggcagcagggtgaaccggcgtccgtggcattcagtattcaggcaccggaagcgccatccacgattgagatgacgccgggttattttcagataacggtgacgccgcaccagactgtctacgatgccagtgtgcagtatgagttctggtactccgccacgcaactggcgactgccgccgatattcagtcaaaagcacagtatctgggcgtcgggtcattctggataaaggatggactgaaaccactgcatgatgcctggttttacgtgcgcagtgtaaatctggctggaaaatcagtatttgcggaagcatccggacgtccgggggatgacgcgaaagggtatctggatttttttaagggactgattacggagacgtatcttggtacggagttgctgaaaaaaattgacctgacggagaataacgccagcaaactgcaacaattttcgaaggagtggcaggacgctaacgataaatggagcgccacgtggggcgtcaaaatagagcagaccaaagacggcaaatattatgtggccggacttggactgagcatggaagacacgcctgacgggaagataagccagttcctggtggcggcggatcgcattgcttatattaacccggcaaacggaaacgagacgcccggattcgtcatgcagggcgaccagataatcatgaatgaggcgttcctgaaatacctgagcgcgccgaccattaccagtggcgggaatcctccggcattttccctgacgccggatggaaagctgactgcgaaaaatgcggatatcagcggccatatcaacgctgtatctggctcgtttacgggagaaatcaatgccacctccggtaagttttctggcgtgatagaagcaagagagtttgtcggtgatatctgcggctcaaaagtcatgcagggcgtgagcatcagggcgacgaacgacgaacgcagcacctcaacacggtataccgacagcgccacctatcagatagggaaaaccatcacggtgatggctaactgtgagcgtaacggtggcaccggtgccatcaccgtcacgataaatattaacggccaggtgaaaacggcggaggttatgccgtataccgcagggattccggccatgtatcagaccgtcgtcttttcggtctacaccacttcacctgtcgtggatatcagcgtctctctgagggtccgtgggcagtacaccacgtctgcttccgtctggccgctggtgatggtttcccggtcggggagcaacttcacaaactgaccggatttccggtccctttcgtttaatgaggaacaaatatgactatgtcgcgcgtaatttctctggcggcagggctttccctgtccgttttattttccactgctgccgttgccgataacggaagaggaagcggcaacagcaatattgaaaaccagacccggatttataccggcaccgaccgtgggcagaaacagcaccgcgaggcaaagggaaaaacaatcacgcggagcgtccagtgttctctgccggcatatttacgtgacccggataatcagtgctgagatgtgaatgaatctgaagcctgcctgcgggcgggcttttttatggaggcaatatgccagtacttatttccggcgtactgaaggatggtacgggaacgccggtacagaactgcaccattcagctgaaggcctgccggaccagtacgacggtggtcgtgaatacggtggcatcagaaaatccggatgacgccgggcgctacagcatggatgtggagcaggggcagtacactgtcacgctcctggtggacgggtatcccccgtcacatgccggagttattacggtttacgatgattcaaagccgggcaccctgaatgattttctgggggccatgacagaagacgacgtccgcccggaggcgctgcggcgttttgaggcgatggtggaagaagttgcccgccaggcatcggaggcatcgcggaatgccaccgccgcagggcaggcatctgaacaggcgcagacatcagcaggtcaggcatcggaaagcgccacggcagcagtgaatgcagccggagcggcagaagcatcagccacacaggcagcctcatccgcagcatctgcggagagcagcgcaggtacggcgaccacaaaagccggggaggcatcagccagcgcggcgtcggctgacacagccagaacggcggcagccgcatcggcagccgcagcgaaaacatctgaagcgaatgcagatgcctcccgtactgccgccggcgattcagctgctgccgcagccgccagcgcgacggcggcgcagacatcagcagagcgcgccggagcatccgaaaccgccgcgaagacgtcagaaacgcaggcggcttccagtgccggtgatgcaggtgcgtcagccactgcggcggcagcgtcggaaaaggcggcagccgcatcggcagccgcagcgaaaacatctgagacaaatgcagcaacgtcagcaagtacagcagcggccagcgcaacagccgcctcgtcatcagcatcggaggcatccactcacgccgccgcatctgataccagcgcatcactggcggcgcaaagcagtactgctgccggagcagcagccaccagagcagaagatgccgcaaaacgggcagaagatatcgcggacgtgatttccctggaagatgccagcctgacgaaaaaaggtatcgttaagttaagcagcgccacggacagtgacagcgaagcgctggcagccacgccaaaggcggtccatgctgtcatggacgaggtacagaccaaagcgccgctggacagtccggcactgactggtacgccaacagcaccaactccggaaaccgcagctgcaggtattgaaattgccacggcagcgtttgtggctgcgaaagtggcgcagttggttggttctgcgccggaaacgctggacacgctgaaagaactggctgacgcgctgggtaacgatccgaactttgccaccactgtactgaataaactggcgggcaagcagccgctggacgatacactgacggcgctgtcaggaaaaagcgttgacggtcttatcgaatacgttggtttacgggaaaccataaatcacgccgccgatgcattactaaaatcacagaacggtggcgatattccggaaaagccgctgtttgtacaaaatatcggagcgctccctgcatcaggtacggctgttgcagcgaacagactggcatcacgcggcgcgcttccggcactgactggtgcgacaagaggcagcgatagcggcctgataatgggcgaggtctacaacaatggctatccgacgcaatacggaaatattttacgtctgaccggaactggtgatggggaaatcctcattggctggagcgggacaaacggtgcgccagcgcccgcatatattcgcagtcatcgagataccgccgatgctgagtggtccgaatgggcgatgctctacacctcactaaatccgccaccgaattcgtatccagtaggtgcggcgatagcatggccgtctgatgctaccccagccggttacgccctgatgcaggggcaatcgtttgataaatctgcttacccgttactggctatagcgtatccgtccggcattatccctgacatgcggggctggacaataaagggtaagcccatcagtggacgtgctgtactgtcgcaagaaatggacggcaacaaatcgcacagtcacagcgccagagcgcaggatactgacttagggacaaaatctacctcatcctttgattacggcacgaaatcgaccaataccacgggcaatcatactcaccagttcggcggttatatcaattcatactggggagattccaatcacacctcatttcagcctggaggtggtgcatggacacaggccgctggcgaccatgcacatacagtttatatcggaggacatgagcacaccatgtatataggtccacacggacacgtcgttattgtggacgcagacggtaatgcggaaaccacggttaaaaacattgcatttaactacatagtgaggctggcataatgacttttaaaatgagcgaacaggcgcagacaattaaaattttcaatctgcgttcagatactaacgaatttattggtgcaggtgatgcgtatattccgccgcacacaggactaccggcaaactgtactgatatcgcccctcctgatattcccgccagtcatattgctatatttgacgctgaaacccagacatggagtttgcatgaggatcaccgcggcgagatggtttacgacacaacaaccggcaatcaggtttatatctccgctcctggtccgttgcccgaaaatgtcacatcagtttcaccaggtggtgaataccagaaatgggatggtaaggctaaggtctgggtaaaagacgaagcggctgaaaaagcagcgcagcttcgtcaggcggaagaaaccaaaagccgtcttttgcaaatggcatctgaaaaaatcgcgccattgcaggatgcagttgatcttggaatcgcaacagatgatgagaaagcgcggctcgacgaatggaaaaaatatagggtgctggtaaaccggatggatacagccgcccctgactggccggaaagaccagccagccagtaggcgttactgtggtaatgcaggccacctgattgctgtgaaggtggcctcatctgaaacacctgttaagtccagcgatttaagaacattgatataattcatcggcagaatcaaagctgctttattttcatcactgataatccccagcgttaattctatgcgccagtccttaatggcattatctgaatcgttaagtaatttctgccgggtgacttctgcctgccaaaattgaacgccgggcgttgataccggatgatctggtcatcgtggaaagcgaccctgaaaaaatcgacacttagctgtaaaatgacagtcccgccatccggtcatcataacggatttttcttctgcaccttctgaagcccgccatggcaggacgaccatgaatccgccgataaccttattgtgaaattaagaccaggaagagatgatgtctgtcggacagatactatatgtaaatttataaaggttttttgttatgccctttcatattggaagcggatgtcttcccgccatcatcagtaaccgccgcatttatcgtattgcctggtctgataccccccctgaaatgagttcctgggaaaaaatgaaggaatttttttgctcaacgcaccaggctgaagcgctggagtgcatctggacgatttgtcacccgccggccggaacgacgcgggaggatgtggtcagcagatttgaactgctcaggacgctcgcgtatgacggatgggaggaaaacattcattccggcctgcacggggaaaactacttctgtattctggatgaaggcagtcaggagatattatcagtcaccctggatgacgtcgggaactataccgtaaattgccaggggtacagtgaaacacatcacttaaccatggcaacagaaccgggagtggaacgcacagatataacttacaacctaaccagtgatattgatgctgcggcctatctggaggaattgaaacagaatccaattataaataataaaataatgaatccggtagggcagtgtgagtcattaatgactcctgtaagcaattttatgaatgaaaaagggttcgataatattcgttatcgaggtatatttatctgggataaaccaacagaggaaataccaacaaatcattttgcagtggttggaaataaagaaggaaaagactatgtgtttgatgtttcagcccatcagtttgaaaatagaggtatgagtaatctgaatggcccattaattctttcagcagatgaatgggtttgtaaatatagaatggcaacaagaaggaaacttatttattatactgattttagtaattcaagtatagcagctaatgcctatgatgcattaccacgagaattagaatcagaatctatggcagggaaagtttttgttacatcaccgagatggtttaatacctttaaaaagcaaaaatattccttaataggtaaaatgtaagcgcaccgtggaggacgtctgtcagaaccctgtcaatccggcgatgatagtgtccacttaaattttgatggacactatcacagatgacagagtccacagcccggcgcaaacacggctgtcggtcaggaaagagaaaagccagtcgctgtacgactggatacaggcgcagttgaaaacattgtcggtgcatgcggagatggcgaaggagttcggttacatgctgaagcagtgtgatgcgttgagcgtgtcctctgctgcgacggtcgggtggagatcgacaacaacatctgtgaaaacgccttacggtgcgtggcgctgggccgacgtaactatctgttcttcggctcagacagtagcggcgaggcagcggcgatcatctatagcctgctgggtacgtgcaaactaaacgacgtggagtccgaggcatggttacgcgacgtgctgtggaaaatcagcgactggtcatcgaaccgggtgcacgaactgctgccctggaacctcgaaaccgtaaaataatccttacgctacgtcctaaacgggacgcttactgagttatgagggtgaggtggttttcttgatgagcatctgaacgccggtttgtgggatagggcaggtgggacggattcgggacagtcatccgtttttaactattggcatggattggtatcttttcgcatcatgggacgtgtgagcgcaggtatgacgcggtatgttattgacttagaatgtggttccaggaactggcgcatccatacccgagcagtttccggtgtcagtgccagcgggcgacgatcgtgaatgtctaccagacctttatcggctgcggaggtaacaatcagaaatccctctgcttcatcaccgcgctcaaacggcgtactgccaatggcagccatgaatatcggcttcccgtcctttctgtgaatgaaatacggctgttttttgtcgccttccttcttccactcgaaccatctatcggcaaaacagatagcccggccatgctgccatagtggcttaaacattctgctggaggccgctgtcgcgacacgggcgttaataagtggagctttatcccaccatccgggagcgtaaccccaaatcaccgggtcgagatgtaattgctcgtcgcgttcgctcaatagcaggactttagtcccgggcgccacgttataccggcctataggctgagggtcataagcaatattacgatcggcttcgtcggccagatatgccagatattcttcacgggtctgtgcttgtgcaaagcgtccacacatatgaaaccgccagtcgtcaggctgaaagtatagggcagggggaaaatgtggcgcgctccggtaatgatttacagggaatttatacagtaattcgaaatgaaaatttgtgtattgatgaattccgaaactgagcagtgagcaaactgatgaatcaatcgcaaattgcgtcgaatctcgacggctttattccccagtttcaccccatagcttccccgtaggaaattgagccataaaaaaaacagccctgacaggctggtttttaaggggaattttggtcggcacgagaggatttgaacctccgcccccccatgttggcggtagcctgaataattatcttggtaaaggttaactatcataaaatggtacaccagtctttccaggaggaggagtgtaaaggttttggctcataaacaccgtcatagtaaagaccacaaatactgcaatcttcatttttatatttatcattgaatgctaaggtaagcttgtcatagacatcaatatttgattgccattcaggtgaggtattcattgaatcataaattaatacttttttcacttcactatcatagcctacaatgcactctgcatgtagacattccgagccaagtgaaggcctgatcaacatcagtggtccatggttttgtaattcgtaagaaataaaactctcaaagtcatcttctacagtactattgaaaacttctgcctgtaaagcttctttaatgtttgtaaaaagagaggattcaggtattttttgcacattcatttcttttaataaattctcacattctattatatcaataccctctaatatattattaaacgcttgattatcagaagtgatgtcctctaatgcactataattattgccatctctggatttgataacatttaatgagcaaacccagcaattattgtagagggtgttgcctgtggtatcaaactggctttgaaagttacgatggtgaataatctgaccctgaggagttgctgtattacttctgtaaacgctgcctaaactattttgaatgtgtcttaacataatatactcgccgaatagtaattttgttaatgtaattatatactacagtgtggatattaatacaattcttttgttgttaattattatttatgaaattaattaaaagtgaataagttagaggtgtttgttggccttaaaattacatttgttgagggggcttatatgatatgtttttattgtattgtcgcatttttcttaagctgaatccggattttggggaggtggctaaatgtaaatgacgtggtttaagataaatctatttttaataagctatctgttcaaattttcgcgatcgcttttgttggtatcactattcaagcagtttgcctgcatcggcttcaccctcacttcggcatcagggaaaatctggtgcacctgcttcgtcagttcggccagaatgatctcgctggccccttcgagtccttcaacattacgcttgtcataaaccagttctacgaacatacgtgtttcgctaataactgtttgtatatacagtatttttgctttggcggttttgtctgtcaaggcatgaaccacttgtttttaaattttggggaacatactgcgggcgtgtttgttatcgattttccctgcagggctgatggggtctggcgttgactaaaattatgtgtggggcatggatggggcaaaagtggtctgtgaagttcgttaaagttcgttaatcaagcttcatctcgatctcgctcatcccttgtttaaagcgctcctggacgatctttatcgattttaaaaactatgagtacatattataaaaatgtagcaaataggccgtttgtgcctgaaaagatgaacattctgcgtagcgcgatttgcgcaacaggaatagactggagtcgacactctacacaaagatgcgaaaggttttttatgacacaacagccacaagccaaataccgccatgactatcgcgcgccggattaccagattactgatattgacttgacctttgacctcgatgccgaaaaaaccgtggtcaccgcaataagccaggctgttcgtcatggcgcgcctgatgcgcctcttcgccttgatggggaagatttaacgctggtatctatccacgtcaacgatgcgccgtggacagcatataaagaagaagagggcgcgcttgtcatcagcgacctgccagagcgttttacgttacgcattgtcaacgagataagtccggcggcgaatacggcgctggaaggattgtaccagtcaggcgatgcgctctgtacccagtgtgaagcggagggcttccgccatattacctggtatcttgaccgcccggacgtactggcgcgatttaccaccaaaattattgccgataaaagcaaatatccgttcctgctctccaatggcaaccgtgttgcacagggcgagctggagaatggccgtcactgggttcagtggcaagatccgttcccgaaaccgtgttatctgtttgcgctggtggccggtgattttgacgtgctgcgcgatacctttaccacccgctccgggcgtgaagtcgcattagaactgtacgttgaccgtggcaatctggatcgtgcgccgtgggcaatgacctcgctgaaaaattccatgaaatgggatgaagcgcgttttgggctcgaatatgacctcgacatctatatgattgtcgcggtggatttctttaatatgggcgcgatggagaataaaggtctcaatatctttaactccaaatacgtgctggcgcgaaccgataccgcgacggataaagattatctcgatattgagcgcgtgataggccatgagtatttccacaactggaccggcaaccgcgtcacctgccgcgactggttccagttgagcctgaaagaggggctaaccgtgttccgcgatcaggagtttagctctgatttggggtcacgcgcggtgaaccgcatcagtaacgtgcgtaccatgcgcggtttacaattcgcggaagacgccagcccgatggcgcatcctatccgcccggataaagtaatcgaaatgaataacttctacaccctcaccgtttatgaaaagggcgcggaagtcattcgcatgatccacacgttgctgggtgaggaaaatttccagaaggggatgcagctttattttgagcgccatgacggcagcgccgcgacgtgtgatgacttcgtacaggcgatggaagatgcttctaatgtcgatttgtcccatttccgccgctggtacagtcagtccggcacgccgattgtaacggtaaaagatgattataatccggaaaccgagcagtacacgttgaccatcagccagcgcactccggcgacggcggatcaggcggagaagcagccgctgcatattccattcgccatcgaactgtacgataacgaaggcaacgtcattccgttgcaaaaaggcggtcacccggtcaacgccgtgctgaacgtcacgcaggcggagcagacatttaccttcgataatgtttacttccagcctgttccggccttgctgtgcgagttttcagcgccggtgaagctggaatataaatggagcgatcagcagttgacgttcctgatgcgccatgcgcgcaatgatttctcccgttgggatgcggcgcaaagcctgctggccacatacattaaactgaatgtggcgcgtcatcagcaggggcaaccgctatcgcttccggtgcatgtcgctgatgcgttccgcgcagtactgttggatgagaaaatcgatccggcgttggccgcagaaattttaacgctgccttcggccaatgaaattgcggagctgtttgaggtcattgacccgatcgccattgcgcaagttcgtgaagcgctaacgcgtacgctggcggcagaactggcggatgagttcctggctatctataacgccaatcatctggatgagtatcgtgttgatcacggcgatatcggtaagcgcacgctgcgcaatgcttgcctgcgcttcctggcgtttggcgagacggagctggctaatacgctggtcagcaaacagtatcgcgacgccaataatatgaccgatgcgctggcggccctgtctgctgctgtggcggcgcagttgccgtgccgcgatacgctgatgcaggagtatgacgataagtggcatcaggacggcctggtgatggataaatggtttatcctgcaatccacaagcccggcggaaaatgtactggaaaccgtacgcggcctgctcaaacaccgttctttcagtatgagcaacccgaaccgcatccgttcattaattggcgcgtttgctggcagcaacccggcggcgttccatgcgcaagacggtagcggataccagttcctggtcgagatgctgaccgatctgaatagccgtaacccgcaggtagcatctcgcctcattgaaccgctgattcgtctgaaacgttatgatgataagcgtcaggagaaaatgcgtgcggcgctggagcagttaaaaggactggagaatctttccggcgatctgtacgagaagataactaaagcgttagcctgacagtatccgttataaagaggtaagacatgcccggtaagcgttagcgctgccgggcatttttttgccggacgatgacgcttcctggcgaaacgtgaagtgagaatgaaggaaaacgattgctatttattgccgtaggtcaattcccttttgccttgttatcgcccataatacgcccccggtttgcacaccgggaatccaggagagttcatgtactatcccttcgttcgtaaagcccttttccagctcgatccagagcgcgctcatgaatttacatttcaacaattacgccgcattacaggtacgccgctggaagcgctggtgcgccagaaagtaccgacaaagccggttacctgcatgggacttacctttaaaaatccactggggctggctgccggtctggataaagacggggagtgcatcgacgcgttaggcgcgatggggtttggctccctggaaatcggcaccgtgacgccgcgcccacagccgggtaacgataagccgcgtctttttcgtctggtggatgctgaaggtctgatcaatcggatgggctttaataatctgggcgtcgataacctggtcgagaatgttaaaaaagcccattttgatggtattctgggaattaacatcggtaaaaataaagatacgcctgtcgaaaatggcaaagatgactacctgatttgtatggaaaaagtctatgcttatgcgggttatatcgccattaatatttcttcgccgaatacgccagggctacgtacgctccagtatggcgatgcgctggacgatctgttaactgccattaaaaataagcaaaacgatcttcaggcgatccaccataaatatgtgccggtggcagtaaagatcgcgccggatctttgtgaagaagaattgatccaggttgccgatagcctgcttcgtcataatattgatggggtgattgcgacaaataccaccctcgatcgttctctggtacaaggaatgaaaaattgccagcaaacggggggattaagtggccggccattacaattaaaaagcacagaaattattcgccgtttatcccaggagttaaagggacaattgcctattatcggcgtcggcggcattgactcagttatcgccgcgcgcgagaagatagcggcaggagctacgctggtacaaatttattccggctttatttttaaaggcccgccattgattaaagaaatcgtaacgcacatctaaactttaccctttatcagacaaccagggctttatttccggcgctggttgttttatatttctccactgttgcttatttagacattttaggcttttattattggggtaataaacgaagcggcaaaaggacaatgctgttacgagttgcttaaaagcgggagagaggtaatgcgaattaaacctgacgataactggcgctggtattatgatgaagagcacgatcgtatgatgctcgatctcgccaatggtatgctttttcgctcgcgcttctctcgtaaaatgcttacgccggacgcgttttgcccgaccggtttttgtgtggatgatgccgcgctctatttttcctttgaagaaaaatgccgggatttcgaattaaccaaagagcaacgcgcggagctggtattgaatgcgctggtggcgattcgctatctcaaaccgcagatgccgaaaagctggcattttgtagcgcatggcgaaatgtggaccccgggaacgggcgatgccgcaagcgtctggttaagcgatacggcggaacaggttaatttgctggtcgttgagccgggagaaaatgccgcgttgtgtctgctggcacagccgggcgtggtgatagcaggccgaaccatgcagcttggcgatgcgattaaaattatgaacgacaggctgaaaccgcaggttcactgtcacagtttcagccttgaacaagcggtttaattttccagtcgtaacgcggtcttaggcacgcagctacagctcagaatcgtaccatcgtcacccatagccgattttttcagcggacttacttcgccttccagcaaacgtatccggcagcaaccacagataccagcccggcaagaatacggaatacgaatcccctgattctccaactgttccagtagtacctgttgattattcccgcagaaggtttgcccctgccagtcgatggttacactcgcgtccgggtgtttctctggcgtaacgctgttgtcgaccgttgtggcgccataagcttttgccggggctgtcgccagaatctccacctcatcgccgacgcgaatgacgccgctattgcgggcaatcagattctgaccgaaatccacatcgccattgtccagggcggtacgaaaagcttgcagtgtcgccagcggttctccggaaggatgtttttgccccttttcagggctgacggtcgtaaaaatacagcggctacagggcttcacgacgtcaaaaatcacatcgccaatgcgaagcactttccagctatcttcctcccaggccgctacgccggaaaccactaagtttgggcgaaattgttccatttgtacgcctgccggacaacgctgttgcagatcgcgcagcgaggcttcgttggtcaataaatacgggtagccatcggcaaatcccagcggcaccgcgttatgtcgtttgacccggcgtgtcaactgcggcccaacccagcgcaactggacatcgcgggagaaaaagccgctcaaccattgattaatcgccgtcggggcgacgcgagcggtaaaatggtttccccagacctcggtcggcgcatcctgcggggtgaaatccgtaaagcgaaccagcgcgctactgccgtctggcgcggtcaaatgaaggccgtcgtgtaagggagagggggtaaaacgtaccatttgtggaaactggcgggcggtaataaatgtgccgtcaggctcggtcaccatgaagatgcgatcaaaagccaggccgctgatatctgccagcgcatgagtcaggccaatgccgcgcatggatttgaccggatgaataaagagccgtgataacgtcgccaccgtacagtccctcaaatgaaaataagccttcaactttatgacatgggcgtgagattagctataatgcgcaacaattttcttagcgtaaaagtgacaatatgaattctctgtttgccagtacggcccgcgggctggaagagctgttaaaaactgaactggaaaaactgggcgccgtagggtgtcaggttgttcagggtggggtccattttcagggcgacacgcggcttatttaccagagcctgatgtggagccgcctggcctcgcgtattatcctgccgatgggtgagtgcaaggtctacagcgatctcgatctttacctcggcgttcaggcgataaactggacagagatttttaatcctggcgcgacgtttgcggtgcatttcagcggcctgaacgacaccatccgtaatagtcagtatggcgcgatgaaagttaaagacgcgattgtcgatgcgtttacgcggaaaaatcttccgcgtccaaatgtggaccgcgaatcgccggacctccgtattaacgtctggctgaataaagaaactgccagcattgcgctggatctcagtggtgatggcctgcacctgcgcggttatcgcgatcgcaccgggctggcgccaattaaagagacgctggcggcagcgattgttatgcgttccggctggcaaccaggtacgccgctgctcgaccctatgtgtggttcggggacactgttgattgaggccgcgatgtgggcgaccgatcgcgcgccgggcctgcaccgtggtcactggggatttagcggctgggcacagcatgacgaaactatctggcaggaagtgaaagccgaagcgcagacccgggcgcgtaaggggctggcggagtattcctctcatttctacggttccgacagcgatgcgcgcgtcattgagcgggcgcgcagcaacgcccgtcgcgccggtatcggcgagcttatcacctttgaagtgaaagatgtggcgcaactgagtaatccattgccgaaaggcccgtatggtacggtgatcagtaacccgccttacggcgaacgtctggacagcgaaccggcgctgattgcgttgcacagcctgctgggccgtaccatgaaaaatcagtttggcggctggaacctgtcgctgttcagcgcttcgcccgatctgctgggcagcctgcaattacgtgccgacaaacagtttaaagccaagaatggcccgctggactgcgtgcagaaaaactatcatattgcggaaaccacggcggacagtaaaccggcgacggtggcggaagattacgctaatcgcctgcgtaaaaatcttaaaaagctggagaaatgggcgcgccaggaagggattgaatgctatcgcttgtatgatgccgacctgccggaatataacgtggcggtagaccgttacggcgactgggcggtgattcaggaatatgcgccgccgaaaacggtggatgcgcaaaaagcgcggcaacgtctgttcgatattattgcggcaaccttgtcagtgctcggtattccgccgaataaactggtgttaaaaacccgtgaacggcaaaaaggaaaaaaccagtatcagaaaatgagcgagaagggcgagttccttgaggtcagcgaatataatgcgcgcttatgggtaaatctgacggattatctcgacaccggtctgttcctcgatcaccgtattgcccgcagaatgctgggagaaatgagcaaaggcaaagatttcctgaatctcttttcttataccggcagcgccagcgtacatgcgggtctgggcggcgcgcgcagcaccacaacggtggatatgtcccgcacctatctggagtgggccgaacgtaatttgcgtctgaacggactgagcggccgcgcgcatcgcctgattcaggccgactgcctgggctggctgcgcgaggcgaatgaacagttcgatttgatctttatcgatccgccgacgttctctaactcaaaacgtatggaagagtcgtttgatgttcagcgcgatcatgtcgcgttaatgaaagatttaaaacgcctgctgcgtaaaggcggcaccatcatgttctcaaataataagcgcggattccgtatggatctggaagggctggcggaactggggcttaccgcacaagaaattacgcaaaaaacgctctccccggattttgcccgtaaccgtcagattcataactgctggctgatccgcgccgcctgaaaggaaaagtaaatgtcattaatcagtatgcatggcgcatggctgtcgttcagcgacgcgccgcttctcgataacgcagagttgcatatcgaagataacgaacgcgtctgtctggtggggcgtaacggcgccgggaaatccaccttgatgaagatcctcaaccgcgaacagggtctggacgatgggcgtattatttatgagcaggatctgatcgtcgcgcgtctgcaacaggacccgccccgtaatattgcgggcagcgtctatgactttgtcgccgaaggtatcgaagaacaagcggaatacctcaagcgctatcatgagatttcccgtctggtgatgaccgatcccagcgagaaaaacctcaatgaaatggcgcgcgtacaggaacagctcgatcatcataatctgtggcagctggaaaaccgtattaatgaagtgctggcgcagcttggactcgatcctaacgccgcgctgtcgtcgctctccggcggctggctgcgtaaagccgcgctgggtcgggcgctggtcagcaatccgcgcgtattgttactggatgaaccgactaaccatctggatatcgaaactatcgactggctggaagggtttctgaaaacctttaacggaacgattatttttatctctcacgatcgttcgtttattcgcaatatggcaacccgcattgtcgatctcgatcgtggcaaactggtcacctatccgggaaattacgatcaatacctgctggagaaagaagaagcgctgcgcgtagaagaattacaaaacgcggaatttgatcgcaaactggcgcaggaagaagtctggattcgccagggtatcaaggcgcgccgcacccgtaatgaagggcgcgtgcgggcgttaaaagcgatgcgtcgtgaacgcagcgagcgccgggaagtgatgggcacggcgaagatgcaggtcgaagaggcgacgcgctccggtaaaatcgtttttgagatggaaaacgtcgattaccaggtagaaggaaaacaactggtaaaagatttctccgctcaggtacagcgcggcgacaagattgcgttaattggcccgaacggctgcggtaaaaccacgctactgaaactgatgctgggacagcttcaggctgacagcgggcgcatccacgtaggaacgaagctggaagtcgcctacttcgatcagcatcgcgccgaactggatccggaaaaaaccgtgatggataaccttgcggaaggcaagcaagaggtgatggtaaacggtaagccgcgccatgtactgggctatttgcaggacttcctgtttcaccccaaacgggcgatgacacccgtccgtgcgctttccggcggcgaacgtaaccgtctgctgctggcacgactgttcctcaagccgagcaatcttttaattctcgatgaaccaacgaacgatcttgacgtcgaaacgctggaactattagaagaattaattgatggctatcagggcacggtactactggtcagccacgatcggcaatttgtcgataataccgtgacggaatgctggattttcgagggcggcggcaaaatcggacgttatatcggcggctaccatgatgcgcgtgcgcagcaagagcagcatctggcgacgaaacagccgatggcgaaaaaaaatgaggaagttattgcccctaaagcagaaattgtaaaacgtggcagtagcaaactaagctataaactgcagcgcgagctggagcagttacccggtcagcttgaagacctggaagcgaagctggaagcgctacaggcgcaggttgcggatgcggccttttttagccaaccccatgagcaaacgcaaaaagttctggccgatttaagtcaggcggagcaagaacttgagcaagccttcgaacgttgggagtatcttgaaggcctgaaaaacggggcataacgaaaggagcgcctatgtgtgaacatcaccatgctgcgaagcacatattgtgcccgcaatgtgacatgctggtggctttaccccgcctctcgcatgggcaaaaagcagcatgtccacgatgcggcgcaacgttaacgaccgagtgggacgcgccccggcagcgtcctaccgcctatgcgttagcggcactatttatgttgctgctttctaacctttttcccttcgtgaatatgaatgtcgcgggcgtcaccagcgaagtcacgcttctggaaatccccggcgtcatgttttctgaagattacgccagcctcggcacgttctttttattatttgtccaactggtgccggcattttgcctggtgaccattctattacttgtcaaccgcgccagtctgccgttgtcggtaaaaaaaacgctggcaaggatctttttcctcctcaaatcgtggggaatggcagaaatatttctcgccggggtgttggtcagttttgttaagctgatggcttacggcgatatcggcatcggcagcagctttattccctggtgcttattttgtctcgttcaactgcgggcgttccagtgtgtcgatcgccgctggttgtgggatgatatcgccccgcagcctgcactggcgcagccgttaacgccggggattaccggtatccggcagtctttgcgttcttgcgcctgctgtacggcgatcctgcctgcggagagtctcgtctgtccgcgttgccatacgaaaggctatgtccggcgtaaaaacagtttgcagtggacgctggcgttattatttacctcgatcatgctttatctgcccgccaatattttgccgattatgattaccgacttactgggctcgaaaatgccgtcgaccattctggctggcgtgattttgctgtggagcgaggggtcttatccggtggcggcggttatctttctcgccagtattatggtgccgacgctaaaaatgatcgccattgcctggctttgttgggatgcgaaaggccacggtaagcgcgacagtgaacggatgcattttatttatgaagtagtggagtttgtggggcgctggtcaatgattgatgtctttgtcattgccgtactctctgcgctggtgcgtatgggagggttaatgaatatttatcctgcgatgggtgcgttgatgtttgctttagtcgtcataatgacaatgttttctgcgatgacctttgatccgcgtctgtcgtgggatcgtgagtacgaaccaggccatgaggagtcctgatagcatggaacctaaaaaaggggaagccaaagtacaaaaggtgaaaaattggtcgcctgtctggatattcccgattgttactgcgcttatcggagcctggattctgttttatcactacagccaccagggaccggaagttaccttaatcaccaccaatgcggaaggcattgaaggcggaaaaacgacgatcaaaagtcgcagcgtggatgtcggcgtggttgaaagcgcgacgctgactgacgatctgacccacgtacaaatcaaagcgcggctccattccggtatggaaaagttgctgcataaagactcggtattttgggtggtaaaaccgcaggtggggcgtgaaggcatcagcgggcttgggacgctgctatcaggcgcgtatattgaactacaaccaggaagtaagggcagtcagccggaaagctatcagcttcttgactcaccgccgttggcgccgcccgatgccaaaggtattcgtgtgattctggacagcaaaaaggccggtcagctcagtcctggcgatcccgttctgttccggggttatcgggtaggatccgttgaaaccagctctttcgatccgcaaaaacggacaatgagttatcagttgttcattaaggcgccaaacgatcgattggtcaccagtaatgtccgattctggaaagatagcggtatcgctgtggatctgacatcggcgggaatgcgcgtggaaatgggatcgttgacgacgttgtttggcggcggcgtgagttttgatgtgccggaaggacttgagcaggggcaacccgtcgccgaaaaaacggcgtttaatctctacgacgatcaaaaaagtattcaggattcgctgtacaccgatcatatcgattacctgatgttctttaaagattcggtgcgcggattacaacccggcgcgccgctggagttccgcggtattcgtctggggacggtaagcaaagtgcctttctttgcgtctaaaatgcgccaggtatttaacgacgattaccgtattcctgtgctggtgcgcattgaaccggagcgtctgaaagcgcaattgggagaaaatgcggatgttggcgcgcatttgacggaactgcttaagcgcggtttacgcgcttcgcttaaaaccggtaacctggtgaccggggcgctgtatgtcgatctggacttttatcctaaggagccgccgattaccgggctacgcgaatttgatggttatgaaattattcccaccgtcagcagcggtctggcgcaaattcaacagcgactggtggaaacgttggataagatcaacaacctgccgttgaatccgatgattgaacaagcgaccaatacgctgtctgaaagccagcgtactatgcgtcggctgcaaaccacgctggataatatgaacaagattacctccagtcagtcgatgcagcagcttccggcggatatgcaaacgacgttacgcgaacttaaccgcagtatgcaaggcttccagcctggatcggcggcgtataacaaaatggtggcggatatgcagcgtctcgatcaggtgcttcgtgagttacaaccggtgttgaaaactctgaacgagaagagcaacgcgctggtatttgaagcgaaggataaaaaagatcctgagcctaagagggcgaaacaatgaaaaaatggctagtcgtgataatggcgttctggctggcgtcatgtagctccggcggagagaataaaagctattatcagctcccgatagcgcaaagcggtgtgcaaagcaccgcaagccagggcaaccgtctcttatgggtagagcaggtttccgtacctgactatctggcaggtaacggcgtggtgtatcaaaccagtgatgttcagtatgtgattgccaataacaatctgtgggccagcccgctggaccagcaattacgtaacacgctggtggcgaatcttagcgcccggcttcctggctgggtcgtcgcttcccagccgttgggaaccacccaggatacgttaaacgttaccgtaaccggattccatggacgctacgatggtaaggttatcgtcagcggggagtggttattaaaccacaatggacagctgattaagcggcctttccatatcgaagccagtcagcagaaagatggctatgatgagatggtcaaagtactggcaagcgcatggagtcaggaagcagccgctatcgcagatgagataaagcgccttccctgagataaaagtaatgtaaatttaaccgcttcaggtcgtgcgcctgaggcggtttttttatttttgacgccggaaaaatagttgttatggctcacattttttgtacaaatgatttaccgtatagctcacaaatatgacattggtgtgaattttgcgcattgacgggcgatccatttagaggtattcgtgtagtgtgattgcacattttgtaatcactgttttcttttccaccagatacaaatatgagggaaacgaggcatgaagagacaaaaacgagatcgcctggaacgggcacatcaacgtggatatcaggccggcatcgccggacgatcaaaagaaatgtgtccctatcagacgctgaatcaacggtcatactggttgggaggttggcgacaagccatggaggacagggcggtaatggcctgattctgtctctttagaaaaagaaacctccgcagtgcggaggtttcgcctttatgggctttgcaagcatgataccgatagcgcggaatatcaattcaacacttagaacgcggaagtatcctggaacaaaccgactttcaaatcgtgtgcggtatagatcagacgaccatccaccagaacctcaccgtccgccaggcccatgatcaggcgacggtttacgatacgtttgaaatgaatacgataggtgactttcctggctgtcggcagaacctggccggtaaatttcacttcgcccacgcccagagcgcggcctttgccttcgccgcccaaccagcccaggtagaatcccaccaattgccacatagcatccagacccagacaaccgggcatcaccggatcgccgataaagtggcatccgaagaaccatagatccggattgatatccagctcggcttcgacatagcctttgtcgaaattgccgcccgtttcggtcatcttaacgacgcggtccatcatcagcatgttcggtgcagggagttgcggccctttagcgccaaacagttcaccacgaccagaggcaagaaggtcttcttttgtataggattcgcgtttatctaccatgttttatgtaaaccttattttattgaagcacgcaggatagctaacacgtgtacgctgaacaagtccgatcagttcggaataaaagcgttcagccaacgtaatggccacgggaaacgatgacggccttcctgttgcgtcgcctgcgcgatacgctcctggatagtctgcatcaacgtcgtttgaccttcgccatcccacaccagatttaacagtagcggtaaggcgtcggtcacgtcgtctaccgcccagatagtgaacttctcttctttaaccgcttgcagcagttcagatttaagactgagatggcggacattggcggcagggataatcacgccctgtttaccgtttaattcccgctgctcgcagatggcgaagaaaccttcaattttttcgtttagcccgcccaccggttgcgcgcgaccaaactgatcgaccgagccggtaatcgcaatattttgattcactggcacattggccagtgcgctgatgagcgcacataattccgccattgaggcgctatcgccatccacttcgctgtaggactgctcaaaggttaacgaggcagagaagggaatttgttgctccagctgcaactccgacatcaggaaggcctgcataatcatcattcccttagcgtggatatttccgccaagttcggccttgcgctcaatatcattaaattcgccatcgccgatatgcacaacacagctaattcgcgacggttcgccaaaggcgcgaggatgcccgggaaactcaatgacggaaagcgcattgatttgtccaacgcgttcgccttcggtttcaatcaggatctgctcttgcagaatctcatcctgcatccgttccgccagaaagccttctcgccattcgcgtcgggcaagcatcagactgagcgcttctgcgccgcaggtatcgccttcgcataaaggcgatgcctccttaaactggcgggctatccacagtgggcaaagaggcagcgtatcctgttcgccggtatagcgcacagcctcgcgtatcagagcgggccaggcatccggtgccgggggcggcaaattatcgcgtaaagcgatacgcgtcacccattgacaccacagggtcatagcttctgcgtccgctatctgtaaattgtcttcaaattcactgtagatagcctgttccgcgagctccggttccatctcctgaaaatcagccagtgattcacgttcgccaaccagaatcaccttcagtttgagcggcattgatggcacggagaccggtaatggacgcgactcgtcaaaggccacccagtcaaaacgctcgcggctaacgatggctttcagacgcatccatagtaacggctgcgccagaagggttcgtaaggaaataatcagcacgccgccgtttgcctgatgaaccagtcccggctgcagggtaatgtcgccgttatactgccgcaggcaaccaaagagctgttcggcttcgacccagtccgcgctgacgacttgtgtgacggtggcaaagttgtcttgcgcattctgcgcggcgcggtaatgaacagtatgcccggaaacgtcataatgtccgccggttaattgtccggcatcggtttgcagagcgcggacggcatctgaaagtaaagtgagatactcttgctcttcaggcgctttagtcagcataaaagaggatgatgcccacggctgtataagttgctcaagcgcaaattgcagtcgtggctgagtatcactgagtaaggtgtcgttttcgtcagtcgcgtgtggctgtgcaaatatctcctgatagctttcgctatccggaaccagatcacgccatgcaagtttcgtaatggtcaaagttgaggttttttagtctgttgtaaaaggggggattatagcctaacccgtcacgctgcacacgcggaaagcgaatgcaaagtaatatgaagacgtgtaaccattcacaggttcgagattcttttcttcagatggctaaaaaactgatattctgataacagttacacggtaacattgggatcacaatgaaatatcaacaacttgaaaatcttgaaagcggttggaaatggaaatatctggtgaaaaagcaccgcgaaggggagctgatcacccgctacgtggaagccagtgctgcccaggaagccgtcaatttgttgttggccctcgaaaatgaaccggtgcgggtaaatgtctggatagacaggcatatgaatcctgccttgcttaatcggatgaaacaaaccattcgggcaagacgcaaacgacacttcaatgcggaacatcagcatacgcgcaaaaaatctatcgatttagagtttatggtctggcagcgtctggcgggccttgcgcagcgacgcggtaaaacattatccgaaacgattgtgcaactgatagaagacgcggagcataaagagaaatatgccacgcaaatgaccacgttaaagcaggatttacaggcgttattaggcaagaagtaacgctgaaaggcgttgtcatccagaccagagcaaaaaaccccgcgacgcggggttttttatcagacggaaacttaagcctgcggctgagttaccacgtctttaacgcctttaacttcgatctctacgcgacgatccggagccaggcaatcgatcagggcagcgcgaggtttcacgttgtcacaggtgttgccggtaaccgggttagattcgcccataccacgtgcggagattttgtcagacggaatacctttggagatcaggtaatcaacaacagactgagcacgtttctcggacagaccctggttgtaagcgtcagaaccgatacggtcagtgaagcccagaacgacaacggaaccgtctttcggatccaggttgctcagctggctgtacagctgatccagagcctgctggccttccggcttcagggtagatttgttgaagttgaacagtacgtcagacttcagagtgaagtgcttggtctgtacttccggagccggagctggtgccggagctactaccggagcagcttcttgctggccgaaacggtaggaaacacctacgctcagcaggccgttgtccggacgggtgccgatggtgttggcatcaccgatgttgttagtccactggtattccagacgggttgcgatttcaggggtgatagcatactcgataccgcccgcgaataccggggaaacgccggtgtcgtggtctttagtagacgggccgccagggacgttagacttggtgtctgcacgccataccataccacccagacgggtataaacgtccagatcgtcagtgattggataacccagtttagcggtcaactgaacgccctgagctttataagcgccattgatgttgtcgcctttgtacggcatacggcctaaccagtcgtagcccatttcaaagccaacatacgggttaacctggtaaccaccaaaagcacctgcgcccagttggttttcatgagtcgggccatcattgtgaatgaagccggtgtcatggtactgagaccagcccagtttagcaccagcgtaccaggtgttatctttcggagcggcctgcgctacggtagcgaaaccagccagtgccactgcaatcgcgatagctgtctttttcattttttgcgcctcgttatcatccaaaatacgccatgaatatctccaacgagataacacggttaaatccttcaccgggggatctgctcaatagttactctaccgatatctacggcttatgctgagcacccctggcgatgtaaagtctacaacgtagttggaaacttacaagtgtgaactccgtcagacatgtgaaaaaaacatgacggatatacacatcatttaacagtttcagatgataaatcgtacagcaaaaattgcggaaaccgcttctgacaagcgttctcgcaaaaaaaacgttagcactcaaaggagatacgttcgcgtaaaaaaaagtccaggataaatcctaattttacttaatgatacaaattagagtgaatttttagcccggaatgctgtctcctgggtaaagcgtgcgcacgtacagggcgcatgataaaccctaccgcattacctaccttcgctgcttcaaccaggctggcatgttcttcttctgtcagttcttcagtcatccaaccaattaccacgctgtaatttcctgtacgcaaagcgcggatcatcgactccagcgtatgacgaggcgcaagctggctaatttgcatcactttcgttaatggcaaacctgaagactgtacccattcacggctgagcttttgctgcggcgtgagccagagctgccatcgtgattgttggcctaactgacggagtaaaggcaaaagcaggagttgcgccatcatgggctggtcttcgtggtagacaacttcactgaccagtcctgccgcggcattttccgtagcggtgcgcgcagcgttgtgggtagtggtaggaaatgacgaagaacgatttgcataacctgaagtgtacataatcaatccagccctgtgagttactgtatattcatacagtacccctgtggcgatgaaagatcaactctattttcggaaactgtctcgcaatttttattcttagtggcgtcaaaaataaaaatcatcttgctcgcggagtataagttgcctattttcgtcattaacggatccgttactgcaaattattcttttactttatgatttaaaaggaattttatgagagcactctcttatgacaggatctataaatcgcaagaatatttggcctctttggggacgatccagtatcgatctttattcggtagctatagtctgaccgtggaggataccgtctttgcgatggtggctaatggcgagctttatctccgcgcctgtgaagaaagcgtaccctactgtgtgaagcatcctcccgcctggctcatgtttatgaaatgtggacgtcccgttatgctcaactattaccgggtggatgaaagcctgtggcgcgatcagcagcagctggtgcgtttatcgaagtattctcttgacgcggcaatgaaggaaaaacacagccgtattttacagcacagactcaaagatctccccaatatgaccttccatctggaaacattgctcaatgagtcagggataaaggacgaaaatatgttacgcatactgggcgcgaaaatgtgctggctaaggttgcgacaaagcaatcccttgctgacggtgaaagttttgtatgccctggaaggcgcaattgtcggcgtacatgaagcggcgctcccggcgagtcgtcgccaggagcttgccgactgggctcattcgcttacggctgggtaattaatgtagaaatcggcggtgaaatttgccgttgcaagcgtccaatctcgggcagtaaggcaatgagcaaaccaatttgttgaacaaccagaggttctttgctgtccggacgtgtttccagtgactgaactcgctgctttaaaccctccagcgcctggtgtacgcgctgttcgtcttcaggttgatgatgaagcgcatcatcaacgtagcagaccgcgtcatccagaagccccaacacgtccggattactgagcttttcgcggtgcgcgccgagggcggagatatagctggtaaaagtgtgattgaggcaaagcagcctgaacgccgcctcccgggtttcagccgtgacgtcgggttcgctcgacatattagaaaccacggatgccagttctgcatcgcggttgtgcgcgtcgcgtctggcaatgcgataggccaggcggttatcccgtccctggtgatattgctcaaggatcgcatcaaggtagcggcaattagcatcggtggcgcgctggagtacccggggaaggttgcgaaagcgccagtccggccaaataaagctgaccgcagcccaggcgatagcgcagccaattaacgtgtcgacgacgcgcggtaacgctacctcgaagccttcgcccaggaggttaaagcagagtaataccagcagggtgatgaacatcgtcgcatgggcatactgcacattacggaatgcgaagaaaagcacgccggtaatcaccagcagaactaactgtccttcaagcgaaggaacaaaccataaaatcggcaggccgatagcaacgcctaccaacgtgccgataatcctgagcgcaaggcgatggcgggtcgcgttatagttaggctggcaaacgaacaggctggtgagcaatatccagtacccgtggcgcatcccggtaatttggatgagagcataaccgatgcacaataccagcgacatgcgtaccgcatggcgaaagagagcggactccggggtaaaattacggctcagacgcagccagatgtcgctaaacccgtgcaggctatcatcagccaactggttttctgactcattgcgcggcattgcctgggcctgctccgactcgatcgtcgctagttgcgcatcaatagcgcgtaggttggttaataagaatccaagcgtattcagcagctctaaagaagcgccgctggcgcgcatacgttcaagcgcggcgtcaatgtgggtaaagacgcgttcaaagcgcggatcatgctggtacggcgtacgcagtaagatacagcgcgccagctgcgtacaggcctgcgcctgcatcgacatcagacgctgaaagcggaacatgacgtcgctatggcgaaaataatcgcgcagcgtctggtattgaatatgcgaagaactggcgcgttcatgaatatcctgcgccacaaaatagtaatggagggtgcggcgcgtaccgcgttgaccgcgatcgccgcgcaggcgagtcaacaacgacactttcgtttggttcagcgtcgccattaactgcccgttcgctaacgctaaatcatagagcggcgcctggctttcatcttcaatatcaggatcaaacagacgtgatttcagttccagatagtgcgctaactgttcgtaactgcgtgccagattatcctgcaacggacggatcggaaatagcagatgcccggttagcgtcagtaggttataccatactgcgcctgccagcaggagcagtggttgctgataccagtgatcgtataaagaggtacccagcatcgtatagatggcaatgagtaacgcgccgaacgcgatggtggcatagcgttgccccagtcctcccaacagaataaacccgctggtggataacgttaagcccaacgcaaatagccacggccagggaaagagcagctccacagaagccgacgcgataaaaaagcaaattaaggtaatgattaaattacgcaagcgtccggcaaggcgatcgtcgagatcggttagcgccgcggcaaccataccgagcgtgagcgggatggtaagtttgacgtcgcccagccaccagggcagggcggtggtgccgcacagagcgataaaaatgcggatgtaatacagccaggtactgttccaggtataacggcgaatcaacggacttaacataaaggctatttgtcccgatcattcaaaacggcggcgcgcgttagcttctcgcgcggcgcgagcggtttctacagagacgacgcggcgaccgacaggccaaagcgcaatcgcggcaattttaaagttcgcaataccgacaggtatcccgatgatagtgacacactgcgcgataccggaggcaatgtgcatcaggcatagccaccagccgaaaaaaagtaaccagaaaatattcagcaaggtaccgccagtattcattaatacgctttttgccgccggattaagttcgtcaacgtgaatggcttcattaccgtaagggaacagggacagtttggttatctcccagcaggagcgggtcaacggcagggtaaaaataagcacaatactgaccagcgtcgccagcagccaggccagcgtagtggcaaagccgcccagtacaaagtttaaaatattcagaacggtacgcataaaccctcagttcattccggttttctatcactgcgggcaattgtaacgtttttttagactggagcacgttttctctggcggttacactgataagcacatctttacgtctggattcgctgagtcatggaactgaaagcaacttctcttggaaaacgtctggcgcaacacccgtatgatcgtgccgagatcctcaacgctggggtgaaagtgtctggcgacaggcatgaatatcttattccattcaatcagttattggcgattcactgtaagcgtgggctggtatggggcgagctggagtttgtcctgccggaggataaagtcgtgcgtttgcacggtaccgagtggtcggaaacccagcaattccatcgctatctggacgcgcactggcgtcgctggagccaggagatgagtgatgtcgccgcgcaggcattacaggagcaatgggcgcgtattagtgagcgaacgggcggaaaccaatggcttacccgtgaacgcgttcgggggctggaacacgaaattcgccagacgtttgccgccttgccgctgccggtctcacgtctggaggagtttgctcactgtcgcgagatatggcgtaagtgtctggcatggttacaggatagcgagggtagtcggcagcagcataatcaggcgtatgctgatgccatgctggaagcgcatgccgacttttttacgcagatagaatcctctccgcttaatccttcccaggccagggcggtggttaacggcgaatcatcgttactggtactggcgggcgcgggaagcggtaagacctcggtgctggtggcgcgcgcgggttggctgttggcgcgcggacaagccgatgcggggcaaattcttttactggcgtttggtcgcaaggcggcagaagagatggatgagcgtatccgcgagcgcttacatacggaagagattactgcccgtacgttccattcgctggcgctgtatattattcagcaaggcagtaaaaaagcgccggttgtcagtaagctggaaagtgacgccaccgcgcggcatcagctatttctgcgcacctggcgtcagcagtgtagcgagaaaaaagcgcaggccaaaggctggcgtcagtggctggaagaggagatgcagtgggtagtgccggaaggtaatttctgggacgatgagacattgcagcggcgtctggcccctcgcctggatcgttgggtcagtttgatgcgtatgcacggcggcgcgcaggcagaaatgatcgctggcgcgccagaggagtgccgcgagctgtttggcaaacgcattaagctgatggcgccgctgctaaaggcctggaaaagcgcgttgaaagcggaaaatgccgttgatttctccgggctgatccatcaggcaatggtgatcctcgaaaaagggcgttttatcagcccgtggaagcatattctggtcgatgaatttcaggatatttccccgcagcgggcggcgctgttagaggcgctgcgcaagcagaatagccagactacgctgtttgccgttggcgatgactggcaggcgatttaccgttttagcggggcgcagctctccttaacgacggcgtttcatcagacgttcggcgagggcgagcattgccacctggacaccacgtaccgctttaacagtcggattggcgatattgccaatcgctttgtacagcagaatccgcaccagcttaaaaaaccgttaaatagtctgaccccaggcgataaaaaagcggtgacgttattggatgaaagccagttggacgcgttactggataaattatccggctatgcgaaggaagatgaacgtatcctggtgctggcgcgctatcaccatctgaaacccgcgagtctacaaaaagcggcgactcgctggccgaagttacagatagacttcatgactatccatgccagcaaaggccaacaggccgattacgtgattcttgtcggattgcaggagggtaacgacggtttccccgccccggcgcgagaatccattatggaaagtgcgcttcttcctcaggttgaggattttccggacgctgaagagcggcgtttgttatatgtggcgttgacgcgcgcgcgtgcgcgggtctggctgctttttaataaagataatccctcgcgctttgtggaggcgcttaaacagctggatgtgccggtggcgaggaagccctaaagcgcgggcggtacagcatcccgcccgcgtagcgtttatttcaggcgctcggccagataacgcgcataatccggaataagaatatctacagcgtcattaaaatgcggggactggatgataaagtccgccgttgagacgttagtggcgacagggatattccatacggtggccagacgcagtagcgctttgacatcggggtcgtgcggtaccgcgttaagcgggtcccagaagaaaatcaacacgtcgattttcccttctgaaatgagtgcgccaacctgctggtcgccgcccatcgggccgctcagcatcgcattaacgtccataccggttgcgcgctggatcagattccccgtggtgccggttgcataaagaacgtgtttttccagcaacggctgatggcgttccacccagttcattaacatctgtttgcagtggtcgtgagcaaccaacgcgatatgtttgcgcgtcggcaaggtgcgagtcgtcagttccataattcgattccgtagttaacctgtctacagattactggaagcgcttgatgctgcaagagaaagagaaaaaaattgcgcgctgggacaactcatatcaagagggcggctgtttttccgcccattgcagaaaatgatggcgtgtctgcgggtcggccagtcggaaccaatatttcagccgctgttctgtcagagtttgtgattgcggcggtacggtatcaagctctgagacgtcggaaagtaatgtgctgtcgtctgccatcatcgtggcgaactgaggaagcgaggcgcgtttcgccgatttattataacgctcggtctctatttcataatcgaccactttagccgtagaagtaatggccagaatatcgagttttaccggaatgggcatggcgtcgccgtccaaaagcgccagacgcggcgccgcgttaaaatgcgaggcttcgcgctcgttttccagccgcgggagctggaaattgacctgacttatcagttgggtatcgaaacttatcaccagcggcggagaaatataaagccgctcttcattaccgggcaggcggatggttttttccacccggaaaacgagttgatgcggcccgttttccagttcaatgctctctgcgccgcgtaataaagagctggacacctttttgccgtccagcaccagcagatcaacctcattagacaaacggagcgttgtggcaaaaacagtcaccggcaaacagagagcaaggaaggtggctagcgcgccggttttcataaggttctcctgtccaaaggccgtctggctaataatgtatcgaaatttttcttagatcatgtttactaacatatagacatattttggcgttttgctctcatacatcggtatgggatgaatggttgctatgtcaggtttgtcgtacactttgcaaaacagccaggagaaagatgatgaaagagaccgatattgctgatgttttgacgtccactcgcactatcgcgctggtaggtgcgagcgataaacccgatcgtccaagttatcgggtaatgaaatacctgcttgaacagggctaccatgtgattccggttgcgccaaaagtcgcgggtaagacattgctggggcaacaggggtatgccacgctggcggacattcccgaaaaagtcgatatggtggatgtttttcgcaactctgaagctgcatggggcgtcgcgcaggaagctatcgccatcggcgcaaaaacgctatggctacagcttggcgtgatcaacgaacaggcggcggtgctggcgcgggatgcaggcatgaccgtggtgatggatcgctgcccggcgattgagatccctcgcctggggctggcgaaataaaagtttaaatggccggatatcgctttccggccttttaaatacaatcagttacgtagtcgcggcgcctgaagctgcttgcgaatggtacgcgccagttcatccatcgatggctgttctggatgctcgtcccgcatttcgcttcgcaactgggcctcggccagataagtatgcactggctgaccatcatcatcttccattaccacgtggtaccacggagcggcgcgaagttcgtcgttaaccgccagttcatcaggcgacggctcatcaagcgaatattccgggtcgatatcgacgaccactccgaggtaacctaacagggaatggcggacctgttggccgataccgaatttgctggctatcatagtcacctcccgggaaatagataccctttatatgaggatactattccacttttcaagttacatgacgcgacaggcaaaccctttcagatacagcccttccgggtaggtggcgatcaccgggtgatcggcggcctgacggaactgctctataaattgtacatcacgaccggcatctattgcggcatcggcaatgattttctgaaataaatcgctggtcatcagtccggagcaagagaatgtcagcagtatgccgcccggattgagcagttgaatcgctaacatgttaatgtctttatagccccggcaggcgcccattaactggcttttattttcaacgaatttgggcgggtccatgatgatgacgtcgaatttttcgccgtgttcacggtaagcgcgcagcaacttaaacacgtcgtcgcgcacgaattcggctttgctcaagtccagttggttcagttcaacgttttgcctggcgatatccagcgcatcctgtgaggtatccacgctgacaacctggcgacaaccgcccattaacgccgacacggcaaaaccgccggtataagagaagcagttcagtacccgctgattttccacgtagcggcgcgtcgccagacgactgtcgcgctgatcaagataataaccggttttgtggccgccctggatatcgaccagcaatttcataccgtgttcttcaattggcaaaagcgcaggcggcagttcgccagtgaccggaccttgcgtcagcgccatcccttcttttttccgcacggcgacgtcgctgcgatcgtaaatagcgcaatccggatagcatgtttgcagcgcgctaattaatgcggcgcgttgatattcggccccggcgctgagcagttgcagcaccaaaaaatgaccaaaacgatcgatagtgacgccaggcaggccatcggactcaccggcgatcagacgatagctatccaggccgtcttttttcgccagccagtcgcgccactgctgcgcctggcgcaggcggcgggtgaaaaacgcaatatcaatggattctgctttatcaaatgtccagacgcgcgcgcggatctgggaggctggtgaccaggcgccgcgtgctaaccactttccctgatggtcgacgatatcgatagtttcaccgaggttggctttgccttccagacgggatacggcgccggaaaagacccatgggtggcggcggagtaaagatttttctcgccctttgctgaggactaaacggggatattgcggaaatgtagattcagtcatgcggagtaacctctcacaaacagtgacgcgagccggatgatagttccagcctgggaccgtgaaaacgaaatggcgcgtagggtagcacagatgagaggggcaatcaccagcgtatggcggtgagcgtttctgcacaaaatagaatcgtaaaggcacagtttcttcagcggacgctttttatagtgttatttctttacacgaagaaggaaatacaatgaaaacagtcttctctttgaccgcagccgcaatgatggcattgagtggcggcgtatctgccgcgtcggcgtttagcctcagtagcgcggatattccggcggattttcgtttaacgcaacagcacgtctttaaaggatttggttgtagcggagaaaatatttcgccgcagctgagctggcgcaatccgcctgccggaaccaaaagctacgctattaccgtcttcgatcctgatgcgcccaccggaagcggctggtggcactggacgatggtgaatattcctgcgcagattcacgacctgccgacgggggctgataaaaaaacgttacccgccggagtggtgcagggacgtaatgatttcggttatgctggctttggcggcgcctgtccgccgccgagcgataagcctcatcgctatcagtttactgtgtgggcgctgaatacggcaacactgccgctcgacagtgagtcaagtggcgcgttggtagggtttatgctgaacgcgcatgtgattgcgaaagcaaaattcacggccacatacggaagataaaacagaggacggcacggtgcaggagatgcatattcgacatcaggatcttacgacggcagaggtgcgttccagtcatctgcaccgtttgcatcgtgttacgcttttttccgccgctatctgccatattacgcagggcagtaaagtcatcattcaggatgatagccgccttgtcgccgggcctggcgagttgattattatcccggcgaacacgccgctggagattattaatcagcctgcgcagaacggttttcgctccgacctgttattactttcaccggagattattgctcgctttaaaacgatgtacgttcaggattatccaccggcaaacctgacatcgctgtgtaccccgatgagccgtagcctgacatttatgtgggagaacgtgttggatgctgtgcgccaggggttgcccgttgggctacaggaacatcaggcgatggggttactgttagcgcttttacatgatggcgcggcgggaccactgcttattgaacggcgttacaccctcacggagcaggtgcggcaactgattatgctctcgcctgctaagctatggacagcccaggagatagcccgccgtcttgctatgggaacatcgacgttgcgtcggcgtttgcagcgtgaatcgcagagttatcgacaaattgttgaagaggtgcgcatgtcctgcgcactttctcaactgcaatcgacgacgctgccaatcggcgaaatagcgctacggtgcggctacctgtcggggtcgcgatttacggccagattccgccagcattatgggtgtctgcccagtcaggtacgttaagtatgtcctgtatgagcctccaccgttgattatgaaaggagaaccatcatgtcgaacgtctgcattatcgcctgggtttatggtcgcgttcagggagtcgggtttcgctataccacgcagcatgaggcgcagcggctggggttaaccggctatgcgaagaatatggatgacggaagcgtagaagtggtggcctgtggcgacgcggcgcaggtggaaaaactcatcaagtggctgaaagagggcgggccgcgctctgctcgtgtggacaaaatcctcactgaaccgcacagccctcgcgagacgttaacaggctttagtattcggtattaaatacattttaccggcttgggcagaccggcgattttggtcgcttgctttgccgggcctttcgggaacagacgatacagatagcggctattgcctttttcttcgccgaacttattcgccatcgcttttaccagcattcggatggcgggagaggtattaaactccaggtaaaattcgcgcacgaagcgcacgacttcccagtgttccgcagagagctcaatgccttcattggcggcgatagcgactgccagcgcttcactccactgcgtcgtctctttcagatagccttcgctatcagtactgatttctttaccttcaaagatcaacataacgtttcactgcgtaatcaacacggacggcagtgtagcaaaaaataaagccctgcataagcagggctggaagaggggaatgtcgattagtcgcggctggcgaagcccagaatgctgagcaggctgacaaagatgttgtacagcgaaacgtacagactgacggtcgcacgaatatagttggtttcaccgccgtgaatgatgttactggtttcatacaggatagcgcccgaggaaatcaggataaacaccgcgctaatcgccaggtgcaatgcaggcagttgcaggaaaatattcgccaccataccaatcagcacgacgacgatcccggccattaacataccgcccaggaaagacatatccttacgggtggtcagaacgtaagcggagcagcagaaaaatactaacgcggttccacccagcgccaggccaatgacatcgcccatgcctgctgacagataggcgttaagaatcgggcccaggatatagccgaggaagccggtaaacgcaaaagcagacaggataccgaccggcttattggcggttttataggtcaggaacatcagcccatacataccgaccagcgtcagaatcaggccgggggagggcagcatcagtaccgtactggctgtcgcggtaattgcggataaagccagcgtcaggctcaacagaaaataggtgttgcgcagtactttgtgcgtactcagtagcgagctacgatcacgcgatgatgtaatgatacgatccattagtcactctcttatgacagatgtaattaataaaggagaataataaaaacagtcactgtcacccagtggttttacccatctttacgcattcgtttacgtttagtttccttaagagatttcaggtgattaccgtcgttaaaacggtctgctcatgcctggcgctacgccataaaacaggcggcagcgccaaccacgcgttaccgataaaaaaatcgctaatcacagcggtgaaacagtggaggcgatcaatacgtattcagccagttttgtgttgaagaaatggtcaatgtgccgctatttcaggcaattaacgaaattttgcctgtttttcacgcaaacgaacacattcggtctttacatggcgcaccgggatgtttatagtgcgcctcattccggaagtgtggccgagcggttgaaggcaccggtcttgaaaaccggcgacccgaaagggttccagagttcgaatctctgcgcttccgccagattaaacaaggggttaccgaaaggtagcccctttgtttttttaggcgctatagaatatagttagaaaatactgttagaatatttcccgaaaaaacggactacgcgagtctttagtttcttttcgtttcccgatgtgtctatttattgaagatgtagaccattctgggaggtgaaggatgccccatctctttcagaataatgttggtatattcgacaacagggcctcttggatgattttcttctttatcctgaagatgggtcagggcatgtacaacttcatgaataaatgaacgttttgtgtcaaaaagttgtcttccttcgttactttcataatgttcggtatatgaatcatcagaatcgtccagattgagacaaataactttcctgccttctgaaagtttgaagtgttcctgagccacggtagtttcaaaggcttcgcctgcccccagtagccagcgctgctccacatcatgtagttctttttcatatgcgtaattcatcagtctgcggaatgtttcgctttgggtatacgcattttgaagtacggaggatagttcatcgtagcattcgtcataagtgtcgtcatcaatttctgtatcagggtctattccacccgcgcctgagataaggtactccaccacacactctggctccagacggaattcactgtttatggcaaggctgtcatgagcaaggcgtagccgtgaggggtttggtgcatgttcgggaatatcggggaaaacaggtgtatctgcggtatttaatctatatgtggatactccgctttgaggtattaatctgtaggtgaccggaagcataacttcttatttcctgactacaattatgaattatttaaattaaacaataatagtgtttttagttaatgtgccacatacaggtaacgctatgattcagacaaagccaacaagtaatacgctgaaaatgttatttataatgaaacttaggggcggggtttatttaataaaacaagggggcctctgtttgaatacttcttgtttataaaatccctttatctcgactaaaatatcggatgggggaaaagagttctatcattgtaatccgggagtggagtaggggtatgttgactacctgtcagatcggctcctgttaatgctttcgctaaagttagagctatcttatctaatttcgcaccatttagtttggtgtcagttaagtctgagccgaatagaattgcagcggttaagtttacaccggacatgttagcgcaagtcaggtctgcgtgagtcaggtttgctttagtcatgtttgaacccattagatttacagcgtgtagatttgcacaacacaaatttgcaccgactaaatttacattagatagagttgtttcacggaaatctgcattagaagcatctatttttgacaaatcttccccctggaaatctttatgagccaggtttactccgcgcaggttcagaaaaccatcctcggttataagtgaatcaggctgttgtatattatgtttactcatcagttttaacattcgacatacattccaaaatctctcactatcaactttatccgttacagtttttccatttttgttcacttcaataatgaccatgggatccgtattttcggatgctgctccacatgacagacatatagtacacccgttgacatcctccagaaatattttattaccatcgaagaaagcatttttatttacatataataatgatgtggtcagttttccaattacctcccgaaaccatctttcattgcttcttcttactccaccacaggtaaaaaaattgacaaaccattccagtataccgcgtggtgaagttgcacttttcattgcttctttcgtaccggtaccggccgcatgcaaatatcttaatatattttctggggacgcgttagttattggcattttgattccttcttatggaagtgagccgactccttataggtgtgagtcaagtcacatttatacaaggaataataaaaaaagatataaggtgatttttgtatttagagctttggttgagtatgagtaggtgtctggcatctgacaagaggcgatgatatctgccataacggtgaagcagaagtaatatcacccgtgaataataagattatccttgctattgacttccttcatttccagcatagcttacgcttcatcatcattgaataaacaattaagtttgttgagcgaaaatttacttaaagaaaaaataataagcaccaatattttttgcagtatttcaacttataccagaataaatgcgcgtagatggcgtaaaaacctgatgagcaggaatacttacacactaaaaatgctcccgcaaacagagcaaaatgagagagatgaacgtttgccccttacatttccaccaaagattctggtcttgtctcttgtaaagggcatacgtatcgcgttttatctcattaagaaagtatgttgacgtattaaattatgcataatgctctttcaattgcttcacgtttgaaatgaataattcaaaaccagtgagcgcctcttcttcggtactggtttgcggcaagcgataaagcgccactaaagcagtattgtctgcgtcagcgccgatagtgacggcgctggtgtagttcagacgtaaaaaatgctgcaaagtcaggatgtcgtcaggcaatggcataaagggacagcacatttccagtgtatgatcggattcattaaaataaacctgtatcccatcatcaatgataagcagtggctcatcttctggcgcatccaggcctaacgcgtcatataaacgatttaatagactttccatatagttacctcaagactcaagatgtgattaatgaagaaatgccttttactgactgccaaatattttcatccccaactcgtttttgataggaaagattgagcacctctggcgataaatttttcattactttgtttcccgccccgcccgtattttgtttctgaatctccaggttaccgctattcagtaatactttttggaaaattttctgtccaccgctatccggaagactaccaggcgcacttaacatatgggtctgatgtaaggaaatgatctctcgcttgatttctgaatccatcatccctgtacgatctttgccgcttttacaattccaggcgggtaccgcgtcaatttcatgggctaacatggcaaggcgttgtgcgagtttatagggttcgccgccatctttatgatgttggttatttttccatatatccttaatctggcgcgctaatgtattgacgacctcataattatccgggtattgcgccagccattcgccaacccagccacctggtctggcttcagggcgtaaatcattgcctaataactgatgtagcgcctcggcattatagctatccgatgccttaaggccaaagccgagcttgagcgccagctcattaacacccacattaaatgcggcgacgtccggttttatttttaccgtctgtagatcgccatctttattgcggatttttaaatgaatcatttttcccggctgggtcaacgattgccatgcgcgcatttggtcctcgaccatcgttccctctttgccgaaaatattcgacgcggtgagtaacccgacggataccagtttcaggcttaccgcctcgcccgctaaggctttgttaagcaactcaggtttactaaaaagtgccgcagttaatacttctttggctttgttttcagcgccgacgtgacgcagaagcggatctttttcatgatagggggaaagcacgccatgacgtatcccgcaaaaaagcgttttatctttaccgtcctcatgcacactcaccgtggacatccacaaattattggcgtgatgaatattcttggtatcccaactgcatacgccctttccctcataagcactgggaaagatatcttttgcgccgattttcatctctgctgcagggagctgcgtgttggtatagtgatgcccgttatgcgtgagtgtattttttatggtttgccagggctggttattaagctgcttgacctgagcatctctaaacgctactgccgcaaagcgatgagcttcttttgcaggtaagccatcctgctgctgagtgcgtgctgcaataagttcgataagatttttcttcaatgcttttgccgcggcttcttcttgttttgttgctggccggtccgctttaactttggctaactccatttggtttgccattgacgttagaaccgggtcttgtttacccagaacggttgccgcgacggtaagaagatcgcgctgtaagttatagaggttatgcagcgagtggttagacgccttctgatgctgtagataattcccccatgtcgcgccgggttctcgcaggacaataatttccgggcgagcgtcgggcgctttagccggcgctttgccctggcctgagagaatctgcattccgttgtataaggttttttgtaggcttttaaaagcctcctgggtttttagtgaagctgagtgatagaagctctgtatttgcatagcgtttttaatattcctgaataggggagtgggaacattcaacagggttaacaaccctttaaaaggatgtgacttttatgcaccaggaactttaaaaaaatgtcctttttaatgaggaaacgcttctgatcaggcggggaggcatcctgacgtccatacgtagtggcgatcatgggggagatcggtacatcaaatgttcataaaatctacaaacttcacaatttatggcacaacttttattgaaaacccaccttcttgactcagatcaaattcaccgatttactcctgcgtaaagtaacggcgttacatcaaatgttatacaggtgtgtgtatgccagcaaagccccggacaagtaagaccgtgacgaagaatattcgtttttcctattccatgcttgaacagatagaattcgcgttgaaatctgaaaagacgcggaatttttcagcatgggtaaaagaggcctgtcgggaaaagttatgtaacacgggacataagctgtagttatcgtcttatgtaagagggggcggccattttgaaaagaacaacgtgcttatatacctcctgggtttttgccgcttttgtctctctgctgatatttgcctggagtgtcataaactatcctctctatgaatccataataattattgtcttttatatctggctaattctggtaccgctttatcttattgtgtatgagtggctaatagattgtcattaaatttatggctgcgtacttgaaaagtgatatttcatatctgtacggtaagtcattgtcgtaataatattattggtcaggcgacgggcgagcgtctgcgcattttgcatcgttttatcttcaaaattttgcagtaagcgttgcgcttctttcggatgcgacgcatataatctcagatagctctgctccatcttatactgctgcttagctgtttgctgttcaaatgttttccaggcgtgttgcacatctggcgcaaacgcattgtagtcctgcataaccagcgtttgcagcgtgcggaatgtccagtaggtagagtcgttgctcgcccgatcggttcctttatcatctccgggttgataatgacgcatcccctgataataggggagatagacgctaagagatggcattccataggcgatgtattctacgttgccgatagcctgcggtaatttcggtctgacctgtaaaatatgtgactcctgggtacgaaaaacggatataggtcgccatggttcttgtggattatgactggcataagggtcgtgcgacgttccctgatagtgattgcgtagcgcgttttttactgccgccacgctgatcttcgttattggcgttaaaaaaacaggaaatgtttccccttcgctaacgaccgtatccagatgcggattaaactggtgttgtagcgtccagacgcgcggataattataggtggtatcgtttttgttatcctgcgaataggcttgatgaaagtcgaattcgccgcgggccggatcatataatccctgctttttcgcaaagcttactaacgttggtgacgccatataattcgcgttatcattcggatcgtaatggcgtaaacgtccctgattggcggaaacgaaatagctatctgccggaagtcgtactgccagccattgatgaccgcttcccgtctccagataccatatctctttgctatcaataaacgcgacgccgaaaccttcgcccgcgcctttttgttcaataatatctcccagtaatttggcgccctgacgcgccgattgcgccactggcaggatcacggactcaatggcgtcttccgtgattcccgtttttgtcacgtaaggatcggcagccagcgccgctctgccgttataaatggtttccgttgcgctcattccgacgcccgccgaattgaaaccggcttcacccatggcgttatcgttagtatcaaagtcatgaatcgccgtatagcgcatcgctgtctccggaagcggccagctaaaattgttccgatgtgctttatactcgccttgttgatgaaacgcgatgggatgaataaccttatgcttggcgttatttgccgagccatcttcgttgcgcgcgataatgaaggagccgtcagccgaagcctgattgcctaccaaaagggtagtacaggcgatgactttacccatacccagcagcgtaacggcgaatgcaagatactttttcataaaggttcccactgaataacgcattatgggatgaattgaccctggattggaaaccgagaaagtgatcgagccagcaatattctttgccggcatcctttattttctctttattgaggttgtattgataaccacagccctgtggcagggaaggggaacagaacctgtcctgaccttagctatcaccactatcaggcagacgaaccgaaaagatattatgttcatcggcatagcggtaagatgccgagccaccgtgtaatagagcaatcgcgttaactaacgataaccccaggccgaaaccggcagtgtggcgggcattatctcctcgccaaaaacgccggaaaagcttatccgcatcggcggggtggctgcctggattagcgacccgaatttctgcaacgttatcatcataagcgctttcaatacgtatcacggcgttttcatcagaataacggatggcattcgtcagcaggtttgagagcactctttgtaataatatttcgtcagcccataccgttccctgacattgatttataaaacagatgcgcttctcctcggcaagggggctaagataatccagcatattttcgaccagcgcattgagcgaaacaggctgtttttttaccgctatattctggtgctccgcgcgtgccagaaagagaatattttctgtcagtcgcgacagtccctccagctcttcaatattatcgacaagggcttgttgatactcttcggcgctgcgttcctgactcagcatcacctgattcttccccagtaaaatattaaccggcgtgcgcagctcatgcgccagatcgtcggcaaattggttcaggcgttcaaaatcgtcggaaagcttctggcgcatggtatttagcgcttgtccaagcggcctgagctcaacgggtaacgcctgttccgccaacggctggcgaagtgtgccgctatctgtcgccgcggtgagtcggctgagcgacgtaatggcccgcagcccgtttctgatgactaatggactgagcgccgaacagacgaggatcgcgataaggctcatcagcaaactgttgcggcgatattgcgccagcatttgccgcctttccgtcgccagcctggcaatagtaagggtcagcgggtcatcgccgcttctggcgcttacgcgtaccgcggtcagttccgtgccttgtaccgcctggcgaaataaggtttcgcgggtgatgtttttagtcagcggaatctcgttaaagcgttggtcggggatgccgctatgattaatcgcaacattgtggcctgttgctgaatggatcaataagatgtcctgcttcgtatccaccatccgattgaaatagagcggcagattttccggcctggcgccatccagtaacagttgctgcatttgcgccgcccgatttattagcgtcatatcatcccgatacgttaattctttgctcagcgcgttatagagcgtccagctaatgccggtacaggcgaggataaggatggcgataaaagaaattgtcaggcgcagcgtcattgataacttaaccattctgcgacgtttccgcctgtaatcgataacccatcccccggacggtcataatgagcttcttttcaaatggatcgtctactttggcgcgcagccgacgaatcgcgacatcaacggtgttggtttcactatcaaagttaattccccaaacttcgctggcgatcgcggttcggggcacgatttctcctgcccgggacgccagtaaccagaggagcaggaattctttgcgggtcagggaaatcggtttgccatttcgtgacactgattgctttgtggcatccatgtccagaccattgatcgtcagtcgagtaaaggcagggacatgctgtctgagttgagctctcacccgggccagcagttcggcgaaggaaaaaggcttaacaaggtaatcattagcgcccgcctcaagacctttgacgcgatcctcaaccgagtcgcgcgccgtcaggcaaataacaggggactgatgcgcagtgcgtaacgcgcgtaaaacctgccatccatcaagccccggcagcataatatcaagaataatcaatgaataatgttcctgaagggccaggtgtaatccgtctcgtccatcacaggcataatcaaccacatagcctgcttccgtgagtccctgacgtacccactcaatggttttctggttatcttcaatcaataaaatcttcatcaacgcagtatgccataggcttgttagcgaatccgtaaatctccaacaagatgacataattgtcatgtccgtgtaaggttaatcctggacgcgccagatatattttcctgcatcaataccgtaaaggagtgaagcatgaaacgatatatactggctaccgtgatagcatctcttgttgcagccccggcaatggcgctggccgctggcaacaatattctcagcgtacatattctcgatcagcaaacaggtaaaccggcgcccggcgtggaggtggtactggagcagaaaaaggataacggatggacgcaattaaacaccgggcataccgaccaggatggacgtattaaagcactgtggcccgaaaaagctgccgcgccgggggattatcgcgttatttttaaaaccggccagtattttgaaagtaaaaaactggatacgtttttcccggagattcccgtcgagtttcatatcagcaaaacgaatgaacactatcatgtgccgctgttattaagtcagtatggttattcaacctatcgcgggagctaatttagagcctatcccattagggttattttacttgccattttggtcctgggcagtgctcgccaaaacgcgttagcgttttgaacgccgcttgcggcggcccgaagggcgagcgtagcgagtcaaacctcacgtactacgtgtacgctccggtttttgcgcgctgtccgtgtccaaactggctgcgccaataacgcctggtgggataggctcttagattgtattaatcgccgcgatttatggcgagcaaacatcgcggcgggaataaaaatcttcagcgtatcgactcttctcccacaagcggtggttatcccgcttgtgggcatgagtgacggttaaacaggcgcttccatctcaagtctgaccggatgaaaacggcgtttgaaataaatcaggccatgcccatcctggctaagaataatatttttgatcgccaccagatacaccagatgcgtgccaatggtttgtacctcgctgatctcgccttcaagaccggccagcgcgccgttaagtaccggctggcccagcggcccgttttgccaacatggctggtgaaaacgctcttccatcgccatccccgtcataccggcaaagtggcgcgccatcagctcctgctcatggttaagtacattaatgcacagcctgccgttaccctgaaaaacggggttcatggcgctattggcattaatacataccattacggagggcggcgtatcggtgacggaacagaccgctgttgcggtgataccgcagcgtccggcgtgacccgccgtggttacgatgttgaccgctgccgccagacttgccatcgcatcgcgaaaacgcagacgttgttcatctacttgcatgagaacctcctgccgcgttatttcagcagcttatccagttgattgatgtcgtcgttattgtgcaaatgcgaaaccgtccagccattctgatcgtattcggagaggcagcgatcaaccattgccatcatcttatccatattgccggagctctgggcctgacgcaggcactgcagacgaatttcatcctggctgcccgagtagttaatctcgtacagctcatggcgaccgccaaactcgctgccgatggcatcccacatcaatttaagaattttgatacgttcaacatggtccattccgttagagccgcgtacgtatttcgctaggtactggtcgatttgcggattattcagatcgcgggcgctggaaggcaggtaaatcaggccgctggtaacgttacgttcaataatatttttaattttcgcgtaggccattggggccatcacacgataggtttgcagcgcggcgtggtccggtagccaggcgccgtttacccacggggttgcttcggaacacatagaatcgctcaatgcccagaacatattgcgccaggccacgacttcgccgagatcggcctgcacgccccggaactctacggtacccgtacattcgagcgattttttcagcagcgcggtaatgaaatcaagtttaaccgccagacgaacacaggcttgcagtggatacatacgggcaaagccgccttccatcgtccagcgacggcaacgatcgaaatcacggtaaattaatacgttttcccacgggatcagcaccttgtccatcaccagaatggcatcgttttcatcaaagcggctggagagtggataatcaaacggcgagcccgtcgcgcccgcgaccatttcatacgaggcgcgcgaaataagttttacgccttcggcatccattggcgcgacaaacatcagagcaaaatccgggttttcgcccatcacctgggctgagccgaaaccaatcatgttgtagtgagtcagggcggagttagtggcgacgactttcgccccgctgacaataatcccggcgtccgtctctttctccagcttgatatagacgtctttcacttcgtcggcaggtttgtggcgatcaatgggcgggttgacgatagcatggttaaagtacaggccggtctcctgaatacgggtgtaccagttacgggcgttctgctcaaactggccgtagaaggctgggttagcgcccagagcgcagccaaaggcggctttgtaatccggtgtgcgtcccatccagccgtaactcaggcgtgaccactcggcgatagcatcacgctgttggcgcagatcgtctgcgcttttcgccacgcggaaaaatttatgcgtataaccgccgctgccggtatcggtattccagcatagggtatcttgcatcgacggtttatgtaatgcgtcatacagttgtgcgacagaggctgcggcattgcggaatgccggatgtgtcgtaacatctttaacgcgttcgccgtaaatataaatttcccgcccgtcctgcaggctttttaaatactcttcgcccgttaacggacgcttgttatcagtacgaaaatcttcaggtttcattgcggcctcttcctcgttaatcggaatgttttgttaataatatgtttcttatttgttgttcaattgaataggcagaagcgtaaactgtgaagagactttcaggacaacggcgggtacttttcagatgaacgtcgaagaagaagagtaaaatgcgatcgccgtcaacgttgtaagcgggaggggattcccgtgtcggcggcgtgggaaggtaagaatactatgcttccgcttcgctatcaggatgctggcgtcccagagcaataagatcgtccagcagcagcatcaattgctgtgttttttcgggcgtgaaatcggcctcaatttttcgataagcctcttctacctggcttcgggcacgggcgtacaacgtttgtccctgctccgtcaacatgacatataacttacgctgatcgttaaccggcttgagtcgcaacaccagtccgtctcgctccatgcgcgtcaatattccggtcagacttggacgcaaaatgcaggtacgaaaggccagctcgtgaaaatccatagaggggctatcggccaggattcgcacaatgcgccattgctggtcggtcagattgtggcttttaacgatggggcggaaataggtcattgccgcttcgcgcgcctgaagcaatgcgatggttaatgaatcatgcataagcgtttctcttttgcagaattattaatacctgaataatcgtgtttaccgatgtgagctatgacatctgttttatgtccaaagtttaacagaaacaaggggctttatttaactatttgatatgtatgtgtttaataataaatttgtgaaaatattgttaatcacatcacaaatgctttacttcagcttgctaaatgtacagcgaaagcataaatctaatcattaatatattaatgaaatcacagcccgttaaatcggcctgaggagtttatgtatgaagggtactgttttcgccgttgcgttaaaccatcgcagccagcttgatgcctggcgagaggctttctctcagcctccctataatgcgccgcctaaaaccgcagtgtggttcatcaagccgcgtaatacggtgattcgtcacggcgaacccattccttatccgcagggagaaaaggtactgagcggcgcgacagtggcgctcattgtggggaaaaccgccagccggatacgccctgaagcggcggcggactatatcgccgggtatgcgctggctaacgaggtcagcctgccggaagagagcttttatcgcccggcgattaaagcgaaatgtcgcgatggcttttgcccgctgggtgaaatggcgccgctgagtgatgtggataacctcaccattatcacggaaatcaacggacgagaagcggaccactggaatactgccgatttacagcgtagcgccgcacaactgcttagcgcgttaagtgagttcgctacgcttaaccctggcgatgcgatcttactcggtacgccgcagaatcgcgttgcgctgcgtcccggcgatcgggtgcgtattctggcgaaaggtttacccgctctggaaaatccggttgtcgcagaagatgaattcgcccgccaccagacttttacgtggccgctgtcagcgacgggtacgttatttgcgttggggttgaactacgccgatcacgccagcgagctggcatttacgccgccgaaagagccgctggtatttatcaaagcgccaaacacctttaccgaacatcaccaaacgtcggtgcgcccgaacaacgtcgaatatatgcactacgaagccgagctggtcgtggtgattggcaaaacggcgcgtaaggtgagcgaagccgaagccatggagtatgtggccggttacaccgtctgtaacgactacgcgatccgcgactatctggaaaactactaccgtccgaatctgcgggtaaaaagccgcgacggcctgacgccgataggcccgtggattgtggataaagaggcggtttctgatccgcacaacctgacgttacgcacctttgtcaacggtgagctgcggcaggaagggacgaccgccgatctgatcttcagcatcccgttcctgatttcttatctgagcgaatttatgacgttgcaaccgggcgacatgattgccaccggtacgccgaaagggctgtccgatgtggtgccgggggatgaagttgtcgtggaagtagaaggcgtgggccgcctggttaaccggatcgtcagtgaggagagcgcaaaatgaagaaaataaatcattggattaacggcaaaaatgttgcaggtaacgactacttccagaccactaacccggcgaccggtgacgtgctggcggaagtggcctccggcggtgaagcagaggtgaaccaagctgtcgcggcggcaaaagaggcgttcccgaaatgggccaacctgccgatgaaagagcgcgcgcgcctgatgcgccgccttggcgacctgattgaccagcatgtgccggaaatcgcggcgatggaaaccgccgacaccggcctgcctattcaccagactaaaaacgtgctgatcccgcgcgcctcgcataacttcgaattcttcgccgaagtgtgccagcagatgaacggcaagacctatcctgttgacgataaaatgctcaattatacgctggtgcagcccgtcggcgtctgcgcgctggtgtcgccgtggaacgtgccgtttatgaccgcgacctggaaagtcgcgccgtgcctggcgctgggcaacaccgcggtgctcaaaatgtccgagctgtcgccgctgactgccgacaggctgggcgagctggcgctggaggcaggaattccggcaggcgtgctgaacgtggtgcagggctatggcgcgacggcgggcgatgcgctggtacgccaccatgacgtgcgtgcggtgtcgtttaccggcggtaccgccaccggtcgcaatatcatgaaaaatgccgggctgaaaaaatactcgatggagctgggcggcaaatcgccggtgctgatttttgaagatgccgacattgagcgcgcgctggacgccgcgctgttcaccatcttctcgatcaacggcgaacgctgcaccgccgggtcgcgcatctttatccagcagagcatttaccctgagttcgtgaagcgctttgccgaacgcgcgaatcgcctgcgtgtcggcgatccgaccgacccgaacacccaggtcggcgcgctgattagccaacagcactgggaaaaagtctccggttatattcgcctcggcattgaagagggcgcaacgctgctggcgggcggtgcggaaaaacccactgacctgcctgcgcatctgaaaggcggtaacttcctgcgcccaaccgtgctggccgatgtcgacaaccgtatgcgcgtcgcgcaggaagagatctttgggccagtcgcctgtctgctgccattcaaagacgaagcggaagggttacgtttggcgaacgacgtggaatacggtctggcctcttatatctggacccaggacgtgagcaaagtgttgcgcctggcgcgtgggattgaagccggcatggtcttcgtcaacacccagaacgtccgcgacctgcgccagccgttcggcggcgtgaaagcctccggtaccgggcgcgaaggcggcgaatatagcttcgaagtgtttgcggaaatgaaaaacgtctgcatctcaatgggcgaccatcctatcccaaaatggggagtttgatatgggcaagttagcgttagcagcaaaaattacccacgtgccgtcgatgtatctttctgaactgccgggaaaaaatcacggttgtcgtcaggcagccattgatgggcatattgaaattggcaagcgttgccgcgaaatgggcgttgacaccattatcgtattcgacacccactggctggtgaatagcgcttaccacattaattgtgccgaccatttccagggcgtctataccagcaacgaattgccacactttattcgcgacatgacctatgactatgacggcaatccggagctcggccacctgattgccgacgaggcagtcaaactgggcgtgcgcgctaaagcgcataacatcccgagcctgaagctggagtatggcacgctggtaccgatgcgctacatgaacagcgacaagcacttcaaagtggtctccatctcggcgttctgcactgtgcatgattttgccgacagccgcagactgggcgaagccattctcaaggcgattgagaaatatgacggtaccgtagcggtattcgccagtggttctctgtcgcaccgttttattgacgaccaacgggcggaagaagggatgaacagctacacccgcgagttcgatcatcaaatggatgagcgcgtggtcaagctgtggcgcgaaggcaaattcaaggagttttgcaccatgttgccggagtacgccgactactgctacggcgaaggcaacatgcacgacacggtcatgctactgggaatgctggggtgggacaaatacgacggcaaggtggagttcatcaccgacctgttcgccagctccggtaccggccaggtaaacgctgttttcccgctgcctgcgtaaggggtgtttatgccgcactttattgctgaatgtactgaaaatattcgcgagcaggctgatttacccggcctgttcagcaaggtaaacgaggcgctggccgccagcgggattttccccatcggcggtatccgcagtcgcgcccactggctggatacctggcagatggctgacggtaagcatgattacgcgtttgtgcatatgacgctgaaaatcggcgccgggcgcagcctggagagccgtcaggaagttggcgaaatgctgtttgggctgattaaagcccacttcgccgacctgatggagaaccgctatctggcgctgtcgtttgagattgccgagctacatccgacgctcaattacaaacaaaacaacgtacacgcgttatttaaatagcacactctttcgcccggtggcgctgcgcttaccgggcctacaaaaaaacgatgcacgaagcaataccgaaccgtaggccgggtaagacgcacccgcgtcgccacccggcacagcagcaccgaatgacgtaacaggaaacactatgctcgataaacagacccataccctgatcgcccagcgacttaatcaggctgaaaaacagcgcgaacagattcgcgcagtgtcgctggattatcccaacatcactattgaagatgcctatgccgtacagcgtgaatgggtcaatatcaagattgccgaagggcgcacgctcaaaggccacaaaatcggcctgacctcaaaagcgatgcaggccagctcgcaaatcagcgaaccggattacggcgcgctgcttgacgatatgttcttccatgacggcggcgatatccccaccgaccgttttatcgtcccgcgtattgaagtggagctggcgttcgtgctggcgaaaccgctgcgcggccctcactgcacgctgttcgacgtctacaacgccacggattatgtgattccggcgctggaactgattgacgcccgcagccacaacatcgacccggaaacccagcgtccgcgcaaagtgttcgacaccatttccgacaacgccgccaacgccggggtgatcctcggtggtcgtcccatcaaaccagacgagctggatctgcgctggatctccgcgctgctctatcgcaacggcgtgatcgaagaaaccggcgtcgccgcaggcgtgctgaatcatccggccaacggcgtggcgtggctggcgaacaagcttgccccctacgatgtccagcttgaagccgggcagatcatcctcggcggctcgttcacccgcccggtgccggcgcgcaagggcgacaccttccatgtcgattacggcaacatgggcgcgatcagttgccggtttgtgtaaggaaaaaacgatgaaaaatgctttcaaagacgcgttaaaagcggggcgtccgcaaatcggtttgtggctggggcttgccaacagttacagcgctgaactgttagcgggcgccggcttcgactggctactgatcgacggtgaacacgcgccaaacaacgtgcagacggtgttgacccagttgcaggcgattgcgccttatcccagccagccggtggtgcgtccgtcatggaacgatccggtacagattaagcaactgctcgacgtcggcgcgcaaacgctgctgataccgatggtgcagaatgccgatgaagcgcgaaacgccgtggcggctacgcgttatccgcctgccggtattcgcggcgtgggcagcgcgctggcgcgggcatcgcgctggaaccgcattccggagtatctccacctggccaacgacgccatgtgcgtactggtgcagattgaaacgcgtgaggcgatgagcaatctggcgtcaattctcgacgtggatggcattgacggcgtgtttattggtccggcggacctcagcgccgatatgggctttgccggcaatccgcagcacccggaagtgcaggcggcgattgagaacgccatcgtgcagatacgcgcggcggggaaagcgccggggattctgatggccaatgaagcactggcgaaacgttatctggaactgggggcgctatttgtcgccgtcggcgttgacactacgctgctggcgcgcggagcggaggcgctggcggcgcgctttggcgtagaaaaaaaactgtccggtgcgtccggcgtctattaagcctggccccgtaagcgcagcgctaccgggcaaccgtagtaccctacaaaattcccatcagaggaaaaaaaatgagcgacacatcatctgcacttccggaaagccccgagtctgtcagttcgcacaacgcgctcagcacgggtcaacaaaccgtcataaataaactgttccgccgactgatcgtatttttattcgtgttgtttatcttctcgtttttagaccgtatcaacatcggttttgccgggttgacgatggggcaggatctggggttaagcgccaccatgtttggtcttgccacgacgctgttttacgctacctacgtcattttcggcattcccagcaacgtgatgttgagcatcgtcggcgcccgccactggattgcgaccattatggtgctatggggcattgcatctaccgccacgatgttcgcggtgggaccgaaaagcctgtatgtgctgcgaatgctggtgggcattaccgaagcgggctttttgccaggaatattgctctatttaacctactggttcccggcatttttccgcgcccgcgccaacgcattatttatgattgccatgccggccactaccgcgttggggtcgattgtctccggctatattttatcgctggacggcatattcaatctgcatggatggcagtggttattcctgttggaaggatttccgtcagttttgttaggcattatggtctggttttacctggatgataccccggcaaaagccaaatggctgacggcagaggataaaaaatgtttgcaggagatgatggatagtgaccgcctgacgctggttcagccggagggggccatcagccataacgccatgcagcagcgtagtctgtggcgcgaagtattcacgccaattgtactgatgtatacgctggcctatttttgccttaccaatacgcttagcgccattagtatctggacgccgcaaatcctgaaaagttttaatgaaggcagcagcaatatcaccatcggcctgctggcggcgatcccgcagatttgtactattctgggcatgatttactggagccgccattcggacaaacatcaggagcgtaaacatcacacggcgttgccgttcctgtttgccgccgcgggctggctgctggcgtcggcgaccgaccataacctgatccagctcctggggatcgtgatggcatccacgggttcctttagcgcgatggcgatcttctggaccacgccggatcagtcgatcagtttacgcgccagggcgataggcattgcggtcatcaatgccaccggcaatattggctccgcgctcagcccgtttatgattggctggctaaaagatatcaccggtagcttcaatagcggactctggtttgtcgcttctctgttagtcgtcggcgccgccattatctggcttattcccatgaaagcatcgcgtccgcgcgccaccccttgaggagaaactatgtgccaacgtgcgatcgccaatattgatatcagcaaagagtatgacgaaagcatgggcagtaacgatgtgcattatcagtcgtttgctcgtatggcggatttctttggtcgtgatatgcaggcgcatcgccacgaccagttttttcaaatgcactttcttgataccgggcagattgagctacagctcgacgatcatcgctattcggtgcaggcgccgctatttgtgcttacgccgccctcggtgccgcatgcttttattaccgaatcggatagcgatggccatgttctgacggtacgcgaagagctggtttggccgctgctggaagtgctttatcccggcaccagagaggcctttggcctgccgggaatctgcctgtcgctggcggataaacccaacgagctggcggcgctcaaacattactggcagctaattgagcgggagtccacggaacaactggctggctgcgaacataccctggtgctactggcgcaggcggtatttaccttgctgttgcgtaatgcgaagctggacgatcacgccgcaaccgggatgcgcggtgaactgaaactttttcagcgctttaccctgttaattgacaaccacttccatcagcactggacggtgcccgattatgcctgcgagctgcatattaccgaatctcgtttgaccgatatttgccgacgttttgctaatcgcccgcctaaacgcctgatttttgatcggcaattacgcgaggcgaaacgactgctgcttttttccgacaatgctgtcaacgagatcgcctggcaattaggttttaaagatccggcttattttgcccgtttctttaatcgccttgctggctgttctccttcgcagtttcgccaacgtgaagttccctcttttctcaactaagaagagtaaaaacatgatgaaaaaaagcgtcgctatgctggcggtgtgtatgctggcgcaaagccaccttgccattgctgccggtactcctgcgcctcaagagatcaacattgttttactgggcaccaaaggcgggccttctttgctcaatacagccagactaccgcaagcgacggcgcttactatcggcgataaaatatggctgatagatgccggctacggcgccagtctgcaactggtgaaaaatggcattccactgcgcaacatcaatactattttgctcacccatctgcacagcgaccacatactggattatccttccttgctgatgaatgcctgggcgagtggtctgaaagaccataccatacaggtttatggcccgccgggaacccaggcgatgacgaaggctagctggaaggtctttgacagggatatcacgctacgcatggaagaagaggggaaacccgatccgcgcaacctggttaaggcgaccgatattggccagggcgtcatctataaagatgaactggtcacaataagcgcgctgaaagtgcctcattcccctttcccggacggtgaagcgtttgcttaccgttttgatacccagggtaagcgaatcgtcttctctggcgatacgtcctggtttccgccgcttgcaacgtttgcccagggggcggatatcctggtacatgaggcggtacatgtcccctcggtagcaaaactggctaatagtattggcaacggaaaaacgctggctgaagcgattgcgtcgcatcacaccacgattgaagatgtcggtaagattgctcgcgagtcccacgtgaaaaaactggtgttaagtcatctggtgcctgcgacggttgcggatgacgtctggcaacaggaagccatgaaaaattacccgggccctgtcattgtcggtcatgacaatatgacgataagcgtaccgtaggtatcagagcagggataaacccacgggctgacatgatgtcagcccgttatgcttttggcgatcagcatgacgcgcagagcttttgtctaaaacattattttttctaaacactacttgctgatttttatgcacaataaaggtaagatgattgctctggtgaaatatcactaaataagaatgtcacggatggaatttatacagtgttaaaagcaatgcgtttctttgtctgccggccatcagtaatatcctctgtaccggctcctcgttgccaaagtgaaggttagattaaacgaatcaaaaaatatccgaactgtacaatttttatatcaaacatatttaactgcaaaatactgcaaacgtgcgcgaatacacttaatcagtagtatggctaatgcatactttatttcctaaactttcttattatctatttgaatatttctggttaaaccaaatggacaaacggataccagacactcgaaaggataactgcaggcttctggtttaggattgcagttaccaggacaatggctattttctttaagcgatttccatagaacaggattaaacctggtaacgttgtaaacagtaacgggataaagtttatcgtttattaagacccccttattaaaggggatgataatgctacctggaggcatgtaaacatctgcctgataccataaggtcaatctaagattttttaggctatgtatgcatgagaacgacactccggtagagggacttataactgtatcaacgaccttccattccattacagaaaccttttaagtgaaatagtcaatggtgtaaattacattttccgcaagcctattcaggatagatgaaaatctgagaaacataactcgttgaaaacgatcgttttttattgaccactctatttatattgattttttaataagttatttattttatgctcttattttgtttacattctattacatttttgtattttaggcgtggtgtaaatattgggcggtagtggatgttataacgctcaattattaaactgtaagtgactgttgtatttcttatttataaataccgcaacctgtaagcgcagcggtacattttacccggcattgacagggagaaggtacgtatcaaccagagagtacaaaacagtgaaagaatatattcttcaggcaataaatgatcgctaacgtgtaaaaataaccgacgtatctaaaaaatgtgaacgtgtggctggtctttatttaaacgatgatcttcgcaatggcgcattaatggctgacattggcggttcgttgatcgggttgtgcgcggtgaaaggctatatttcttccgttgagggaagtatgtcagaggcattctggtattataccgggtgcatgtaaatccggggtgggcagaaagcccaccctcggtttattgcctttatcgtggattagggatgcgagataaagcgagaaaggcgttgcagcagtaaccggttttcttcgcgcagccgtgaattctcttccagcagcgttaacgcgaccgcgatcccaggccagtcgagcgccagctcctcgcgtaagcgtagcgcgcgttgtaccacgctcgctgcgcgatcgtcgaattgccagtcggcgttatcgtcttcgtaaggctcaattacgccaagtccgacgatttcgtttagctcctcttccgtcacgccggtgtgcaaacaaaattcggtgatggtaaaggtgacagtgatgttagccattatgctttcccccattgctggcgtgggtcaaaggacgactgcgcgtccgccagttgttgccacagggcagctgttttctcgtcaggtttcggcggcataacgattttgatgatggcatagagatcgccagtgtgctttttactggctaatccttttcctttgatacgcagccgctgacctgcctggctgccggggggaatggtcagcaaaatacgctctttaagcgttggcacagacaccttagcgccgagcgccgcctcccatggggcaagcggaaggacgacttccagatcctgattgacgatatcaaagagcggatgcggggcaatatggataacgagccataaatcgccattaggtccgccgttttcccccggcgtgccctggcctttcagtctgattcgttgcccgttgctgacgccagccgggattttcacattcaatgtcttgggaatttcccgctccaccaggccgaacgcgttataaacggggacggaatagctaatcgtacgctggtgctcttccagcgtttcttccaggaataccgccacttcaatttcgatatcatgaccgcgtgcggcgtggcggtgatgcgaatggcgaccgtgctgaccaaaaatagacgagaaaatatcatcaaaatcttcagcgttatacggctggccttcgtgttgctggaactggcgattaaattgtggatcgttacggtgttgccataactggtcatactcggcgcgccgttgctcatcactcagcacttcccatgcttcagcaacctctttgaaacgggcttcggcatcgggttctttgctgacatctggatggtacttgcgggccagtcggcgataggcggtcttaatcgtcttgagatcgtccgtcggtttcacgcccataatggcgtaataatccttaagttccatagcatcatctcgctaaatcaatacatacagaagggaccccaaaaggtttctccactaagtgtagggtaaacctgaaaagtgcgtatgaaaacaccagttatatcattagtaagaataaattacgttgttcgactatcagaaggttgcgcagcgcgccgacataactttacaggggaaaggttgccaaaaccgcgccagtggctaagataactcgcgttaaacagtgagggcgcaatggcgaaacaacaacggatgggctggtggtttctttgccttgcatgtgtcgtggtaatggtttgtaccgcgcaacgcatggcgggcctgcacgccttgcagatgcaggcgacggcctctgctgcggtggtcagcgctccctcctcgacagatgacggctcgccggtcaccccctgcgaattaagcgccaagtcgctgctggcggcgcctccggtactctttgaaggcgctatccttgcgctttgtctactgctttccttactggcgcctgtccgggtcatgcgcctgccgttttcgcctccacgggctatttcgccgcccacattacgggtacatctacgattttgtgtcttccgtgaatgacagaccggttattgctaacggttaattactcattcacggagaaaaaatatgatgattttgttcaggcggatactgttctgcctgttatggctttggctgcccgtctcctgggcggcggaaagcggctggctgcgttcgcccgataacgaccatgccagcatacggctacgtgccgatacgtccgctaacggtgagacccggctgttgctggatgtcaaactggaaaacggctggaaaacctactggcgcgcgccgggggaagggggcgtggcaccctctatcgcctggaaaggcgacatgcctgaggtaagctggttctggccaaccccctcgcgctttgatgtggcgaatatcaccacccagggatatcacgacgaggtgacctttccgatgatcgtgcgcggtacgctgccggcgaccttgcgcggtgtgttgacgttatcaacctgcagcaatgtttgtctgttgaccgattaccccttttccgtgacgcctactgtgcagaatgccgattttgcccatgactatgcgcgggcgatgggtaaaattccgctccgcagtggactaacggactcgcttgacgtcggctatcgcccgggagaactggtggtcactgctacgcgagcggcgggctggtcatcgcccgggctctatcttgacaccgtagatgacgtcgattttgcgaagcctcgtctgcgcgtagagggcgacaggttacaggcgacggtgccggtgacggacagttggggcgaaaaggcgcccgatttgcgcaacaaatcgctgaccctcgtgttagccgatggcgctatcgcccaggagagcacgcaaaccattggcactgcgccagcgcaaacgccggacaatgcggcgctacctttctggcaagttgtaatgatggcgctgatcggcggactgattcttaatttaatgccctgcgtactgccggttctgggcatgaagcttggctctattttattggtagaggaaaaaagccgctctcacatcaggcgacaatttttggcttcggtcgccggtatcattgcgtcatttatggcgctggcggcgtttatgaccctccttcgcctgtcaaaccatgcgctggcctggggagtccagttccagaatgtatggtttattggttttatggcgctggtgatgttgttgtttagcgccagcctgttcgggctttttgagttcaggcttccctcatctatgaccacgaaactggccacttacggcggtaacggtatgtcgggacatttctggcagggggcattcgccacgctgctggcgacgccttgtagcgcgccgtttctgggcacggcggtcgccgtggcgctcacggcgtcgctgccgacgctgtgggggctgttccttgcgcttggcctggggatgagcgcgccgtggctactggtcgcgatacgaccagggcttgcgctacgtttaccgcgccccgggcgttggatgaatgtcctgcgcaggatcctcggtctgatgatgctggggtcggctatctggctggcgacgttactcctgccgcatttcggcttcactgcgtcaaagagcgcgcaagacacggttcagtggcaaccgttgagtgaacaggcaatccagtcggcgctggcgcagcataagcgggtatttgtcgatgtcactgcggactggtgtattacctgtaaagtgaataaatacaacgtcctgcaaaaagaggatgtgcaggccgccttgcaacagccggatgttgtggcgctgcggggagactggacgctgccgtccgatgccattacagattttctgaaaacgcgcggccaggtcgccgtgccgtttaatcaggtatatggccccggcttgccggaaggggaggcactgcccactttgctgacccgcgatgcggtattacaaacgttgaaaaaagcgaaaggaataacccaatgaaatacatgattgttttactgctggcgctgttttcgacgctgagcatcgcgcaagaaaccgctccttttacgccggatcaggaaaagcagattgaaaatctgatccatgcggcgttgtttaacgatcctgccagcccgcggataggcgctaaacaccctaagctgacgctggtgaactttacggattacaactgcccgtactgcaaacagctcgatccgatgctggaaaagattgtgcagaaatatcctgacgttgcggtcattattaaaccgctgccatttaaaggagagagttccgttctggcggcgcgtattgcgctgaccacctggcgcgagcatccgcaacagttcctcgcgctacatgaaaaactcatgcaaaagcgcgtttaccatacggatgacagtattaaacaggcccagcagaaagcaggggctacgccagtgacgctggatgaaaaaagcatggaaacgatacgcactaatttgcagttggcaaggctggtcggcgtgcaaggaacgccagcgacgatcattggcgacgagctgattccgggcgcagtgccctgggatacgctggaagcggtggtgaaagaaaaactggcgtctgccaatggcgggtaaactgcggcgttggctgcgtgaagccgcggtttttctggcgctcctcatcgcgataatggtggtcatggacgtctggcgcgcgccgcaggcgcctccggcgtttgccacgacaccattacgtacgctgacgggagagtcgacaactctggcgacattgagcgaagaacgccccgtactgctctatttttgggccagctggtgcggggtatgccgctttactacgcctgcggtcgctcgcctggcggcggaaggggaaaacgtcatgaccgttgcgctccgctccggcgatgacgctgaggttgcccgctggctggcgcgcaagggcgttgacttcccggtcgtcaatgatgctaacggcgccttatccgctggctgggaaatcagcgtgacgccaacgctggtggtggtttcacaaggtcgggttgtgttcaccaccagcggctggaccagctactggggcatgaagcttcggctatggtgggcaaaaacgttctgaatatgcgccggggtttcccggcgctaacgcgtttactgtaagaaaaacccccgttttgcgaaatcgttcccggaaaaatgatccatttctgtcacactcagaacgatttgataacaacaagaggtcatagggatgaaaaaatcattactcgctgttgctgtggcaggggctgttttgttgtcatccgccgtacaggcgcagacaacgccggagggttatcaattacaacaggtgctgatgatgagccgccataatctgcgggcgccgctggcgaataatggcagcgtactggcgcagtcgacgccgaacgcctggccggcgtgggacgttcccggcgggcaactgacgacgaaaggcggcgtgctggaagtctatatgggacactacacacgtgaatggctggtcgcgcaggggctgataccgtcgggagaatgtccggcgcccgacacggtatatgcctatgcgaatagtttgcagcgcaccgtcgccaccgcgcaatttttcattaccggcgctttccccggctgtgatattcctgttcatcatcaggaaaaaatgggcactatggaccctaccttcaatccggtaattaccgatgattctgccgcgttccggcaacaagccgtacaggcgatggaaaaggcgcgtagtcagctacatcttgatgagagttataaactgcttgagcagataacgcattatcaggactcgccgtcctgcaaagagaagcatcagtgttcgctaatcgacgcgaaagataccttcagcgcgaactatcagcaagagcctggcgtgcaggggccgcttaaagtagggaactcgctggtggatgcgtttaccctgcaatattacgaagggtttccgatggatcaggtcgcctggggcgggatccacaccgatcggcagtggaaggtgctgtcaaaactgaaaaacggctatcaggacagcctgtttacctcacccacggtggcgcgcaatgtcgctgcgccgctggtgaaatatatcgataaggtgctggttgccgatcgcgttagcgcgccgaaggttaccgtgctggtggggcatgattccaatatcgcgtcgctgctgacggcgctggattttaaaccctatcagctccatgaccagtatgagagaacgccgattggcggtcagcttgtcttccaacgctggcatgacggcaacgctaaccgggatttgatgaaaatcgagtatgtctaccagagcgcccggcagttacgcaatgcggaagcgttaacgctcaaatcgcccgcgcaaagggtaaccctggaactgaaaggatgtccggtggatgcgaacggcttctgtccgctggataagttcgataacgtcatgaacactgctgcaaaatagccatatgccccgcgcaggcgggggcgtttgtgttatacgtttttacgttcgatgatttgttcgccccagaagagcgagtctttgtccgttttctcaaaggctttgatcagcacctcatcgctaccttcttcccatattttttctgccagtttctcgtcatagtgagcgacttcaaaaatggcttcggcaatttccggcgacgtattacgcaggcttgcccattcgccgacgcggtgcgcttttgcttcttgagttggcattcgaatcctcctgttgaagattagccgttgagtttgactgccagaccggcgacgtattccccctgatagcgagcgatagagagttcctcctggcttggttgacgtgaaccgtcgcctccagcgatagtcgttgcgccgtaaggcgtgccgccgcgaacctgggagacgtcaaagagttcctgtgcggcatagcctatcgggacgatcaccatcccatgatgggcaagcgtagtccaggtcgaggtgatggtctgctcctggccgccgcccgttccggtagaactgaacacgctgccgagcttgccgtatagcgagccggatgcccacagtccaccggtttgatccaggaaggtacgcatctggcctgacatattgccaaaccgggttggcgtaccaaaaataatggcatcgtaatccgccagctcctgtggggtggcaaccggtgcgttttgcgttttaccgccagcttttgcgaagatttcaggcggcattgtttctggcacacgctttataatgacctctgcgccgtcgactttctttgccccttccgccaccgcgtgcgccatggtttcaatgtgtccgtacatggaataatagagcaccagaatctttgccatttgtactactcctcagattaatcaggtgtgtagcgattcgctacgtctatttaaagatatgctctcctgtgaagagtgcaaatttcagcgccatttctttgatttataacaataattaatttggcgacctttgttgcaaaatgatacatttttaagcgctttgattttcccaaatataagaataacttatttatttcttatggttattattctgcgtattcggcttccaatgttgcagaatatttcggtaagcggcctactacgacgtttttcactatgcttaatgttacgcggcgttactgatgatatcgttcatacgctgcgcgaggagatactcctcattacctatgcaatatgatgtctaatctatgacggaggtcagtaatggcaaaccatcgtggcggttccggtaattttgcggaagaccgcgaaagagcatcagaagcaggtcgtaaaggtggtcagcacagcgggggcaattttaagaatgacccgcagcgtgcatccgaagcaggcaaaaaagggggcaaaagcagtaaccgtaatagctagcctgcgtcacaacagcaagacgctgagcgtttcgcgctaaaaagtgtcatgcgccaccgccgccggatttccggcggtttttttgtttataagccggatttggtatgcttgcgtcctgacaaaaaggagagggcgcatgtcgcaacgcacagagaaaaaaatcgggaaacgctcgcaggccaccggtgcaaaacggcagcttatcttaaccgccgcgcttgctgttttttcccagtatggcattcatggcgcgcgtcttgagcaggtcgccgagcgggcaggcgtctccaaaaccaatctgctttattattatccctcgaaagaggcgctgtatgtcgcggtaatgcgacagattctggatgtctggctggcgccgctcaaggcgtttcgcgcagaattttcccctctggaggccatcaaagagtatatccgtctcaagctggaagtttcgcgtgattatccgcaggcgtcgcggctcttctgcatggagatgctggcgggcgcgccgctcttaatggaggaactgaccggcgatctaaaagcgttgatagatgaaaaatccgcgctgattgccggatgggtgcacagcgggaaactggcgcccatttctccgcaccatttgatcttcatgatttgggccgccacgcaacattacgccgattttgcccctcaggttgaggcggtaaccggcgcgacgcttcgcgatgaagccttttttaaccaaacggtcgaaagcgttcagcgcattattattgaagggattcgcgtgcgttaaccggctggcggcagtgggcagctcaaatccccctcttcacattgcagcagcgaggctaaaaacgcttcgcgttcgttcgttttatcggtcaggcactggctggcgatcatgggttgcacgctgccgccctccgtacctgagcgaatcagcgcgcaatcggcgtcgcgcagggcaatccatgccacctgtgctttttgtaacagctcgcgctgcggcggttgcgcacgcttaagcgcgctttgataggtttcgttcagctttttatctgccgcctggtattgcgcggcggcgcagcgattcatttccagctgcgtactggcgctggcacactcatcggccaacgcctgactgctgatcaacaacgccgcgcaggtaaggaaaattcgtttcatacggtcctctgacgcgagtaaaaaggctccattgacggagccttaattaaccacagtattagccaattgtcatcaggctggcattaccgccagcggcggcagtgtttacgctcagcgaacgttcaatatagagccgttccagcagtatattgctttcgccgcgggcgaacccctgtaccgacactatcgcgccttcgcgggcggcgacggcttcgcacacggttcgcagcttgtcggagtcgccgtggaaaatcaccgcgtcaaacggctgcgccatcagcgtttccgctttcgcaaactggacacgcgccgcgacggcggcggggagacgtttcgccagatcgcggtggaaggcgtcgtctgaccatagcgcctgactgccgacggcgagaacggcggcaagctgcgtcaacgcgtcctgttcatcatcagccaggcataatacccgttcacgcggcaacaacgtccaggtattgcgctcgccggtcggccccggtagcaggcgctgcgtgccggcctgggccagatcggcgaattgtcggcagagcgtctgtagcgccgggcgatccgccgcccattgtgtcagggcggtcaacggcgcgagtagcgtggttttaagctgcgcatccaccgggtaacgcgcatcctgacgagtcagcgtcgtattgagcgcattgggcgggcggtgtgccagcaggcggtagagatagagcggtcctcccgcttttggcccggtgccggacaggccttcgccgccaaacggctggacgccgacgaccgcgcccaccatattacggttaacgtacaggttgccgacatgggcggaaccggtgacttgcgcaatggtttcatcaatacgggtatgtacgcccagcgttagcccgtagccggaagcgttaatctgttcgataagctccgccagttggttacggttataacgcacgacgtgcagcacgggcccgaagacctctttttccagttctgcgaagttttccagctcaataagcgtgggcataacaaacgtaccggtctgccattcctgcgcatcatcgctgttttcacgtgcggcctggaaaaccgggcggcctttggcgcgcatcgtctggatgtgacgttcaatgttggctttggcctcgctatcgatcaccggcccgatatcggtcgtcagacggcctggattccccatccgacactccgccatcgcgccgcgtaacattttcagcgtatgttcggcgatatcgtcctgcaaacacagcacgcggagcgcggaacagcgttgtccggcgctgtcgaaagcggaagccagcacatccacgaccacctgctcggtgagcgcggaagagtcgacaatcatagcgttcataccgccggtttccgcaatcaacggaatagggcggccctgggcgtcaagacgcgtggcgatgttgcgctgcaacaacgtcgcgacctccgtggagccggtaaacatcacgccgcgtacacgcgcatcggcggtaagctgggcgccgacggtttctccccgtcccggcaacagttgcacgacgcccggcggtacgcccgcttccagcaaaatggcaatgccctgggcggcaatcagcgatgtctgctctgccggtttcgccagaacgctgttacctgccgccagcgcggcggcgatttggccggtgaaaatggccagcgggaagttccacggactgatgcagactaccggccctaacgggcgatgcgtttcgttatcgaaatcgtcacgcacttgaccggcataataatggaggaagtctaccgcttcgcgcacttcggcaatggcgttgctgaacgttttccccgcttcacgcaccaacaggccaatcaactgctgcatttggtcttccattaataccgccgcccgctgcaaaatagcggcgcgttcttgcggcggcgtcgcaaaccaaaccggcgcctgattgaccgcgttttgcaatgcctgttcaacctcgctttctgtcgcttcgcgtccccagccaacaatatctttcggttccgccgggttgataaccggcgtcatctcaccgtcggccaccggttgttccagcacaggtttggcctgccatttctgcatggcgttgcttaacagggcagaagaaagcgaggcgaggcgatgttcattcgctaaatcaagtccggcggagtttatccgaccttcgccgtacagatcgcgcggcagcggaattttcggatgcggtatgccagcctgaccttcctgctgcgccagtttttccacggcctcgaccgggtccgccaccagttcatcgagcggtagggtggcatcggcgatacggttgacaaaagaggtgttggcgccgttttccagcaggcgtcgtaccagataggccagcagggtttcgtgtgttcccaccggcgcgtaaatacggcagggacggttaagttttccgtccgccactttaccggtgacctgttcatacagcggttcgcccatgccgtgcaggcactggaattcgtactgacccggatagtaattttgcccggccagatgataaatcgccgccagtgtgtgagcgttatgggtcgcgaactgcgggtagatcagattagggacggcgagcagttttttcgcgcaggccagataagagacatcggtatacactttgcgggtataaaccggatagccctccagcccttccatttgcgcgcgtttgatctcgctatcccagtaggcgcctttcaccagacgaatcatcagccgacggcggctacgggaggccagatcgactaaataatcaatgaccagcgggcagcgtttctggtaagcctgaatcacaaagccaatgccgttccagcccgccagttcgggttcgaagcagagtttttccagcagatcgagcgagatctccagacgatccgcctcttcggcgtcgatattgagaccaatgtcgtactggcgcgccagcagcgtcagggatttcaggcgcggataaagctcctccattacccgatcgtattgcgcgcgactatagcgtggatgcagggcggacagcttaatcgagatgcctggcccttcgtaaataccgcgaccgttagacgctttgccgatggcatgaatcgcttgctggtaagaaaccatataggcctgcgcatcggcggcggttaacgcggcttcgcccagcatatcgtaagaatagcggaaccctttctcttccagttttcgggcattcgccagcgcctgagcaatggtttcgccagtcacgaactgctcgcccattaaacgcatcgccatgtcgacgcctttgcggattaacggctcgccgctcttgccgataatgcggttcagcgagcgcgatagattggcttcgttatgcgttgagaccagtcggccggtaaagagcagcccccaggtggcggcgtttacaaacagcgacgggctacggccaatatgcgactgccagttgccattactgattttgtcgcgaattaacgcatcgcgcgtagctttgtcgggaatacgcagcagcgcttccgccagacacatcagcgctacgccttcttgcgaagagagggaaaactcctgcaacaggccttgcaccatacccgcgcgaccgctggcggatttttgattgcgcaatttctccgccagttgatacgccagtttatgcgcctgctcagcgacaggcggcgacaggcgcgcctgttccattagcattgacaccgcatcggtttccgggcggcgccaggcggcggtgatggcggcgcgagagacggattggggaagaatttgttcggcaaactccagaaagggctgatgcggctcatcctgcggcgcgaccggctcctcgctttcatttgccgcgccgacaaacagcgcaggtagctccggtagcgtatcgctattttccagcttgtccagatagctaaagattgcctgttttattaaccagtgcggcgtgcgatcgatacgcgacgcggccattttgatccgttcgcgcgtggcgtcgtccagcttaacccccatcgtggtggttcccataccctctactcctgttattcgctctatctgctaaccaatagttagcggaaaatatccaccatgttgcaactttgtgcaaccgcgttaaatgtgacctgcgttgcaagcttaaaaatgaatgaattgttaaaaaaagataagggagtgtctgacgagaaaaccatctggatttattttctctgcggtagttaacacttttaaaaggtgcaaccgcaaaaaatgtgagagagtgcaacctggagaaaaatagtatccctctgcaatcaaatttgatgtaaatggtgtgttaaatcgattgtgaataaccaccgcttccggcaggatacggtcgccctggtaaacataacacccttgccacgttccggcagggtacaaaacggcacgctacggtagtgccaataaataaatttggagaaccttgatggctattagcacaccgatgttggtgacattctgtgtctatatttttggcatgatattgattgggtttatcgcctggcgctcaaccaaaaactttgatgactatattcttggcggtcgcagtctggggccgtttgttacggctttatcagccggcgcgtcggatatgagcggctggctgttaatggggctgcctggcgctatctttctgtcggggatctctgaaagctggatcgccattggcctgacgttaggcgcatggattaactggaagctggtggccgggcgcctgcgcgtgcataccgaatttaacaataacgcgctcacgctgccggactattttaccggtcggtttgaggataagagccgagtcctgcgtattatttccgcgctggtcattctgttgtttttcactatctattgcgcgtcaggtattgtcgctggggcacgactgttcgaaagcaccttcggtatgagctatgaaaccgcactgtgggcgggggccgcggcaaccattatttatacctttatcggcgggttccttgccgttagctggacggataccgttcaggccagcctgatgatttttgcgttaatcctgacgccggtgatggttattgttggcgtaggcggtttcagcgagtcgctggaggtgatcaagcaaaagagcatcgagaatgtcgacatgctcaaggggctgaattttgtcgctattatttccctgatgggctggggactgggttacttcggtcagccgcatatcctggcgcgctttatggcggcggactcccatcacagcattgttcatgcgcgtcgtatcagtatgacctggatgattctgtgtctggcgggcgcggtggcggtgggcttctttggcattgcgtactttaacaataaccccgcactggccggggcggtgaaccaaaactcagaacgcgtatttattgaactggcgcagatcctgtttaacccgtggattgccggtgttctgctgtctgctatcctggcggcggtgatgtcgacgttgagctgtcagttgctggtatgctccagcgcgattacagaagatttatataaggcttttctgcgtaaaagcgccagccagcaagagctggtatgggtagggcgagtgatggtgctggtggtagcgctgatcgccattgcgctggcggcgaatcccgataaccgtgtgctggggctggtgagctacgcctgggctggattcggcgcggcatttggacctgttgtcctgttttctgtgatgtggtcgcgtatgacacgtaacggcgcgctggcgggaatgattattggcgcggtgacggttatcgtctggaaacaatatggctggctggatctgtatgagattatccctggcttcattttcggcagcctggggatcgtaatctttagcctgcttggcaaagcgccgacagcagcgatgcaggaacgctttgcaaaagcggacgcgcattatcattccgcgccgccgtcgaagctacaggcggaataaccgacatgtccgatagcattattgccatcggacatattttaccaggcggcgttatacgcccgcctggtcctctgataagtcccggaccgattgactgaagatgttcaggtaaatgaggacgcactctcaaactatttttagcccttgagcgccgttaacgcgggcgtaatacatctcgagtaatcactaactagccatatatgaaatcgcctgttaatggtaccaatagccttgacgcaatagagtaatgacaaaaattaaaacaagtcagcgttactggcgtaagtatgccgcataaaattttgcataaataatgccgttttagcgatgggagagaggacacgttaattattccattttaaccttatatatgttcaatattcaatgggttatggatgttttcagcattaatacccgcagtagctaatgattatcttttttagtctcctgccgatgaaataatcgtgtaatctttctgtaagagactgacaatgacgcaataatgtttggttaatgcttggtgaatatattgttgcattattgatgttttgtgttgtacttagtagtaatagcggtagttccccggcagtgatggtcactcactatggagatcgcgaatggtaatgtccgcaccaggacacattgtttacagtagttacaacaccctgtacggacattctctctccggtggtggtcttgtcatcttaaaagctctcatcatttcccttactgaccatacccatgacgtcatatgtggtgcgcgtagccgtgtgtggcgtcgtttcaaaaagcaagctaaggcttacaaggaagccaaccctcagatgtgtgtgcgcataatcgcgttcaagagaacgcgggtgatgtatacctacaactcaaggtgctatccatgggaagacaaaaagcagtgatcaaagctcgtcgtgaagcaaagcgtgtgttgagacgagattcgcgtagtcataagcaacgtgaagaagaatcggtcacgtcactggtacagatgggcggagtagaagccattggcatggcgcgcgatagtcgcgatacctctcctgttaaggcgcgaaatgaagcacaggcgcattatctgaacgctatcgacagtaaacagcttatttttgcgaccggcgaagccggctgcgggaaaacatggatcagtgcggcaaaggcggcagaagcattgattcataaggacgtcgagaggatcattgtgacgcgtccggtattgcaagctgatgaagaccttggttttttgcccggtgatatcgctgaaaaattcgcgccttattttcgtcccgtctacgatgtcctgcttaaacggttgggcgcgtcctttatgcaatattgtttgcgcccggaaatcggtaaggtagaaattgccccgttcgcctatatgcgtgggcgtacttttgaaaatgcggtcgtgatcctcgatgaggcgcaaaatgtgactgcggcgcaaatgaaaatgtttttgacgcgattaggcgaaaatgtcacggtcattgtcaatggcgatattacgcaatgcgacctgccgcgcggcgtgcgttccgggttgagcgatgcgttggaacgctttgaagaagatgaaatggtagggattgtgcatttcaacaaagacgactgcgtgcgctcggcgctttgtcagcgaacgcttcacgcatacagctaatatagcattgactttcagagcccgggaaaccgggctttgttatctataaagcatccagcagactcatggacaaaaaaggaaaatgacgcctgtacgtgaagggaattattttgtcatgtccagggcattcattgtccgtaatttgctttctcgggcctgttccggcgaggactgtacaagaagggtatagagcaggtcaaagacgaaaagctgcgcggctttcgtaccgatcgagtcaccctgcaacattccttgccgattaccattgatcaggcaaaaatcggcctcttcacataatggagaacccagattatgggtaatggcgactgtggtggcgccagcctgtcgggccaatcggagtgaatgcactgtttctggcgatgtgcccgagtgactgacacccatcgcgacatcgcctgcttttaatagcgtagcctgcatgtacataaaatggttattgcttaccgcatcgccccgtaaaccaatacgcattagcttgtgtttcatatccagcgccgtgatccccgatgagcccacaccaaagatataaactgagtgacagtgacgtagggcatccacgacaccgagaacctgttgcatatcaagcagatttagcgtttcagataatacattactaatggtgttctgcaattttaaaccaatggcgtgggcatcgtcggattcgctaacttcggcatccagtagaggactactgtcatcagactcggtagtggcaagttcaatggccaggtccattttaaaatcctgaaaacctttatagcccagggtgcgacaaaagcgaataaccgtggcttctccggcctgtgtttcgcgcgacaaatcggcaatagatgactgtgtcacctgtctggggaaggctaaaatatattgcgcaatacgctgggaggcacgtgtcaggcttttttgcatagcacccagagtatcaaggatttttccgggtttaagacgtgggggttgaggctccatatagttcctgctcttgagggctgattgcggcacaaagcctgcaatatcgaacagagcagagcctatcaagtctgcggcatgaaaaaaagcgcgatgtaagtaaaggagggggaatatttacatcgcgttgccaacttatgacagaacatcactggagagtaatctgttgctcttacggtgtttatagcgcgccatttgacggatggtttatacctggcccggtattgtcgccccgcgcgttggcgtcaccgtatgctgtgtcggtatagcgtggtatcatgaaatcataatgtcacctttggttcaggtttttcatccagcgtcaatggcggtgccggggcaaataacggggcgaaaataacgccgctgatcaccacgcttagcgagccaatgaccccataaaagaagaagttaaggtcagtggcatagcgtgcgcccagcacggtaatgacgctgataataattcctaaaaccgcactcccggcatttgctcgtttaaagaaaatgcccagcatgaacagaccggtcattggccctcccatcagacctatcagactattaaatgcatcccagatttctgattcatcggccatgaccagccataccgaggccgcgctacttatcaagcccgcgaccagaataactaacttagctattttcatacggttttctggcgttctttttttatgactcaaacgctgatagatatcggaattaaaacaactggaaatgctgtttaagctgctggagatactggactgcgcagcagcgaaaatagcggcgattatcaaccctgcaatgccgactggcatttcggtgaccacgaataagggcaaaatgccgccagtgttgaatcccgccggtaataattgtggatgttgctgataatagacaaacaatgccgagccgatagcaaaaaagaaaacagggatcacagcaaccagtttggcatttgtaagtaatgttttcttcgtttcctctatggagtcagtcacgatatagcgttggaccacatcctgactggcagtaaattgctgaatattggcaaacagaaaaccaatcatcaatacaggtactgtgctttccgtccagctccagtggaactgcgtagccggaaagaatttatccgcctgctgcgtcaccgtaaaaatttcatcaatgccgccctggactttgagacatatcactataaaaatcagtatcgcgctgccagaaagtaagaggccttgaataacatcagtccatattactccttcaattccacccatccaagtataaatgatacacatcacgctaatcaacagtaccaaaatcaccgggtctatagcgatgaaggggcgcaaggccagcacggtgaggaaagtgataatggcgatacgtccaatatgaaacaacataaatgacatgctggcgaacagacggcagcgcacatcgaaccgtgcttcgagatattcataggctgatgtgactttcaatttccgaaaaaacggaatatagaaataaaaaaccagcggtaaaattgcgatagccagatactgaccaatgataaacgtccagtcggaagtaaacgctttggcaggaattgacataaatgtaattgagcttaacgtagtagcaaatacactgaccccagccgcccaaccaggaacccggccaccaccgcgaaaataatcgtctgctgttttttgccgtctggaaaaatagacaccgactaacatcatggccaggaggtagccaaataatacaagataattaacgatgccgaaagaatgtgtaatcatagttctttcctgcttatggttttgagtagagttgcggtcatcgtctgtgtatttttatcttcccatcattcagacgatacgatattcagatcaagtaatagtttttgttaatctcaatgacggtaatcatgagatgtaaaaggcagagcatttatgctccaccaatggtgatgcccagacgtatgtcctgccggatacctgaaatagcagatatccgatattgcgttcaaacaggcttcaggcctgggtctcgtatttgccgatagcattattaacgtcggattattctctgaggcataaatatcaatagtaagcgtgttcattttcttttcctgttcagcgttttactgcgtgactgaaccactgacagatatgctcaatacgggtgatagcggaaccaacggtaactgcccaggcaccatgctcaatagcattggccgccagtgcaggcgtgttatagcgcccctcggcaataacacgacaacctgcatggctcagttgtgtcaccattgccaaatctggctcaaccggcgtgatggggccggtatagccagacagtgttgtaccaatgaattcgattcctttctgatggcaacttatgccttcattcacggttgaacagtctgccatcgccagtaatccatgcaggcgaatacgtgtcagtaaactatcaatatcaaccgggcgagagcggaatgaggcatcaaaagcgataatatcggcacctgcctgcgccagggcgtcaacatcctgtaaatatggagtgatacggactggcgaccctgtaaggtcacgtttaattatcccaataataggaacagaaagatggggacgaacagtccgcagattctcaatgccttcaatgcgcacagcgaccgcacccgccgaagccgctgcctgtgccattgcagccacaatttcaggtttatccatagggctgcctggtaccggttggcatgagacaatcagcccaccgttttcgtgtacactttgttccagcctggctaatagtgacatccagttccgccttatatatttgaagttttgctccgttttatgttatgtcttggagtgttgctacatcaagcaaaaagatagaaaaatgtgaacacagtcataaggtatgtttgttattcaattactgcgccagcggatttgaggctataacctgaagctacaagacaaatacaattcattctgacggcagcatgctgtattttattaactgcttccggcataaagataaaatgctcagaaggagcttatacgccacgggatagccagtatgaaatgcatcacataattcttgttgtatttattcagaatgctatcactaatgagtttggccataacagatcacccataatcacttctaacatcaccatggggtgcttttacctcgcacatgataactccatgtaattatttttagcgcttggtcacattttgtcattgtcattgttgaaattgtgcaccataagatcactaatgatgaagctttactccaattgtatttcttcgcatggggatgcagatgaaaaattttaagaaaatgatgacgctaatggcgctatgtttctcagttgctatcaccacatcaggatatgcaacgacgcttcctgatataccagaaccactgaaaaatggtactggcgctattgataataatggcgtgatttatgtcggcttaggtaccgcagggacatcctggtataaaattgatcttaaaaagcaacataaagactgggagcgtataaagtcgtttcctggtggagctcgtgagcaatccgtgtcggtatttttaaatgatgagctttatgtttttggtggcgtagggaaaaaaaacagtgaatcaccgttgcaggtttatagcgatgtgtacaaatactcaccggtgaaaaatacatggcaaaaagttgacactatatctccagttggattaacagggcatacgggagtaaaattaaatgaaacgatggtacttattaccggaggggttaatgagcatatctttgataagtattttattgatatagcggctgcggctgcggatgaaagtgaaaaaaataaagtcatctataattattttaataaacctgccaaagattatttttttaataaaatcgtatttatctacaatgctaaagagaacacatggaagaatgccggtgagctgccaggcgcggggacggcaggatcgtcatcggtaatgggaaataatttcctgatgctgattaatggtgagctcaaaccgggtttacgtaccgatgtgatttaccgcgccatgtgggataacgataagctaacatggttgaagaacagccagttaccgccatcgcctggagaacaacagcaggaagggttggccggagcattttcgggctatagtcacggtgtcctgcttgtcggtggtggcgcgaattttccgggagcaaaacaaaattatactaatggaaagttttattcccacgaagggataaataaaaaatggcgagatgaagtctatggtttgattaatggtcattggcaatatatgggtaaaatgaaacaacctctcggctatggtgtatcagtaagttatggtgatgaagttttccttattggtggtgaaaatgctaaagggaaacctgtttcgtctgtaacctcctttaccatgcgtgatggtaatttattaataaaataattttttaaatacaaaaataaagttaattgatgagcggagtattttatgaaaatcaacaaatatcttctgggtatggtttcgtttatagcattttcatcatatctacaagcggcaacccttgattatcggcatgaatatgctgatagaaccagaattaataaagaccgtattgctataattgaaaagcttcctaacggcattggtttttatgtcgatgccagcgttaaatcgggaggagtagatggtgagcaggataagcatttaagcgatctcgtcgcaaacgctatagaactgggcgtaagttataattataaagttacggacaattttgttttgcagcctggatttatatttgaaagcggtccagacacttcaatttataagccttatttaagggggcaatataattttgattctggtgtttatatggctggtcgttaccgttatgactatgcaaggaagacagctaactatagtgatgatgagaaaacgaatagatttgatacttatataggttatgtttttgatgagttgaaattagaatataactttacctggatggatagcgatcaaattaaatttgataacaaaaaaacaaactatgaacataatgtggctttagcctggaaactgaataagtcatttacaccatacgttgaggtcggaaatgtagcggtgagaaataataccgatgagagacagacccgttatcgcgttggattacaataccacttttgagaaaggttaaagagttactgtactaatctttgcttagtattcatatcgataatcttatagcccgtagctacgttacagaacgttagactttgtcttgagtattcacgtccttaacgtagctacgaacaaggatgataaacaatgaatatacgccttacatagctacgatctcaggcggttgtcggaaagtgccgattgatagtgtcttattcggcaattgatatgacttaaaaattaattccgtaagcatttcagacggtaacagcaaataagggttttattgtgatagcaaaattcttcccgtggtatagcgagataactcgtccacaaaaaaatgctttattttcagcatggctgggttacgtttttgacggcttcgactttatgctgattttctacattatgtatctgatcaaggctgacttaggattgacagatatggagggcgcattccttgccacagcggcctttattgggcgaccatttggcggggcgctatttggtctgctggcagacaaatttggccgtaagccgttgatgatgtggtcgatagttgcctattctgtaggtacagggttaagtggcctggcttccggtgtaattatgctgacgcttagtcgcttcattgtcggtatggggatggcgggggagtatgcttgcgcttctacttatgccgtggaaagttggccaaagcatttaaaatctaaagcgagcgcatttctggtttcaggtttcggtattggtaacatcatagcagcctattttatgccgtcatttgccgaagcgtatggttggcgtgctgctttttttgtcggtttgctacccgttcttttagtaatctacatccgggccagggctcctgaatctaaagagtgggaagaagctaaactcagtggtcccggaaagcattcacaaagtgcctggtcagttttctctttgtcaatgaaagggctatttaatcgagctcaatttccactgacattatgtgtatttattgttctgttctctattttcggcgcaaactggccgatctttggtctactgcctacatatttgacgggagagggctttgatacgggcgtggtctctaatttaatgacggcggcggcattcggcactgtattgggaaatatcgtttggggtctgtgcgcagatagaattggtttgaagaaaacgttcagcattggtcttctcatgtcctttttattcattttcccgttattcagaattccgcaagataattatttactgctgggcgcatgtttattcggtttaatggcgactaacgtaggtgttggcgggttggttcccaaatttctctacgactactttcctcttgaggttcgtggtttgggtaccgggctgatttataatcttgctgcgacatcaggcacattcaattcaatggcggcgacctggcttggaataacaatggggctaggcgctgcgctaacgttcattgttgctttctggaccgcaacaattctactcattattggcctatccattccggatagactaaaagcacgtcgtgaaagttttcaatcaacaaaagaattttaatagaggataaatgatgacgaaatacggtgttgtaggtacaggttattttggcgctgaactggcgcgatttatgtctaaggttgaaggggcgaaaatcactgcgatttacgatccggtaaatgcggctccgatagcgaaagagttgaactgtgtcgccactgcaacgatggaggcgctttgttcccatcctgatgtggattgcgtaattattgcttcaccaaattacttacataaagcgccagtcattgcggcggctaaagcgggtaaacacgtgttttgtgaaaaacctatcgccttaaattaccaggattgtaaggatatggttgatgcctgcaaagaagctggtgttacctttatggcgggtcacgttatgaacttttttcacggggttcgccacgctaaagcgctcatcaaagctggtgaaattggtgaagttacacaagttcacactaaacgtaatggttttgaagacgtgcaggatgagatctcatggaagaagattcgcgcaaagtcaggtgggcatctgtatcatcacattcacgagctagattgtacactgttcatcatggatgaaaccccatccctggtttcaatggcggcggggaatgttgcgcacaaaggtgaaaaatttggtgatgaagatgatgttgtcctaatcacccttgagtttgaaagcggtcgtttcgcgacacttcagtggggatcatcgttccactaccctgagcactatgtattaattgagggcacgacaggtgcaattctcattgatatgcaaaacacggctggttatctaataaaagcgggcaaaaaaacacactttcttgtgcatgaaagccaggcggaggatgatgatcgtcgcaacggtaacatatccagcgagatggatggcgcaatcgcttatggtaaacccggtaaacgtacgccgatgtggctctcatcaattatgaaactggagatgcagtacttgcatgatgtgataaacggtctggagccaggcgaggagtttgctaaattgctaacgggagaagcggcgacaaatgccattgctaccgctgatgctgcgacgctttcctcaaacgaggggcgcaaagtaaaactcactgaaattcttggctaaaattgaaagccggatggtggtgttattggccggtggcgctgcgcttatgtagaccggataaggcgcccgtgaactgtgccgccatccggcaatggacggggcacatataagcaaaaagcccgtacttctgtacaggctctcaacttaaatatggcggtgaggggggattgactcgctgcgctcgcccttcgggcagtctcctcgcaagctcgtcgtctgtccaactggctgcgccagttgtcgaaccccggtcggtggttctcatccccccttggtttgggggatacatataagcaaaaagcccttacttctgtacaggctctcaacttgaatatggcggtgagggggggattgactcgctgcgctcgcccttcgggcagtctcctcgcaagctcgtcgtctgtccaactggctgcgccagttgtcgaaccccggtcggtggttctcatccccccttagtttgggggatacatataagcaaaaagcccgtacttctgtacaggctctcaacttaaatatggcggtgagggggggattcgaacccccgatacgttgccgtatacacactttccaggcgtgctccttcagccactcggacacctcaccaaattgtcgctccagcattactggaacgggcgctaatgtagggaaatatccattctacgtcaatcaacttttttcaaaaaaaagcgcgtttatacaaacttccaccaatctgtggttttaataagcgaaaactgctttttttgcccgcgccgggaaatttgctatgctgcacatcccgttgaaaacgctgataacaggcgcaatcacattccgcacaatactgctcaggagataacatggagataattttttatcacccgacatttaacgccgcctggtgggtaaatgcgctggagaaggctctcccacatgcgcgcgttcgtgaatggaaggtcggtgataacaaccccgcagactatgcgcttgtatggcagcccccggttgaaatgctggccggaagacgcttaaaagccgtctttgtgctgggcgcgggggtggatgcaattctgagtaaattaaatgcgcatccggaaatgctggacgcctccattcctctattccgtctggaagataccggaatgggcctgcaaatgcaggagtatgccgtcagccaggtattacactggttccgtcgtttcgatgattatcaggcgctgaaaaatcaggcgctatggaaaccgttgccggaatatacccgcgaagagtttagcgtcggtatcatgggcgcaggggtactgggcgcaaaagtggcagaaagtctacaggcgtgggggttcccgttacgttgctggagtcgtagccgcaaatcctggcctggcgtggaaagttatgtagggcgtgaagagctgcgcgctttcctgaaccagacgcgggtgctgattaatctgctgccgaatacggcccaaacggtaggaattattaatagcgaattgttggatcaattgccggatggcgcttacgtgctgaatctcgcgcgcggcgttcatgttcaggaggcggatctgctggctgcgcttgatagcggtaagctaaaaggcgcgatgttggatgtctttagccaggaaccgttaccgcaggaaagtccattatggcgccatccgcgagtcgccatgacgccgcacattgcggcagtcacccgtccggcggaagccatcgattatattagccgcaccattacccagctggagaagggagagccggtgacggggcaggtggatcgggcgagaggatattgatatcaacccggcgcgggccgggtttcgctaaaaaacgctggcgatacctgctatccttgtcggaaatgactacaggagagagcaatgtatcccgttgacctgcatatgcataccgtcgccagcactcatgcctacagtactctgagcgattatatcgcggaagccaaacgcaaaggcattaaactttttgcgattaccgatcatggtccggacatggaagatgcgccgcatcactggcattttattaacatgcgcatctggccgcgtctggttgacggcgtggggatactgcgtggcattgaggcgaatatcaagaatattaacggtgaaattgattgttccggaaagatgttcgactcgctggatctgattatcgcaggctttcatgagcccgtttttgcgccgcatgataaagaaaccaatactcaggcgatgatcgcgaccatcgccagcggcaaggtgcatataattagtcaccccggaaatccaaagtatccagtggaggttaaagccatcgcgcaggcggcggcgaaacaccatgtagcgctggaaatcaacaactcttcttttctgcattcgcgtaaaggaagcgaagataattgccgcgcggtcgctgccgccgtacgcgatgcgggaggctgggtagcgttaggctctgattcccatacggcctttacgcttggcgatttcaccgaatgccggaaaattctggatgcggtgaattttccggaagatcgaatcctgaacgtctcgccgcagcgcttactggcctttctcgaatcacgcggtatggcgcctgtaccggaatttgccgaactttaatcgttatttacgggaagatatcaatgaatgagttttcaatcctgtgccgtgtgctgggatcgttgttttaccgccaaccgcaagatcctttactggttccgctgtttacgttaatccgtgaaggtaaactggcggcaaactggccgctggagcaggatgacatgctggcgcgtttacagaaaagctgcgatatcacgcagatttccactgattacaatgcgttatttgttggggaagagtgcgcggtagcgccataccgcagtgcgtgggtcgaaggcgcggaagagtctgaggtgcgcgcttttttaacgtcgcgagggatgccgctggccgatacgcctgccgatcacattggcactttattgctcgcggcctcctggctggaagatcagtctgccgaagatgaaagtgaagcgctggaaaccttatttgccgattatctgcttccctggtgcaataccttcctcggtaaagttgaagcccatgccgttacgccattctggcgcactctggcgccgctaacgcgtgatgcgataggggccatgtgggatgaacttcaggaagaagatgaagaataatgtgatgtaaatcacccttaactgcaacgggttttacatcattgcataaaatgtgtgcgtgatctcattaatgtgccgcttttctgttatgatgcgcgccatgaacatacttctttctattgctatcacgacgggcatcctttctggaatatggggatgggtggctgtctccctggggttactaagctgggccggttttttaggctgtacggcttatttcgcctgtccgcagggcggctttaagggattgttgatttccgcctgtacgctgttaagcggtatggtgtgggcgctggtcattattcacggtagcgcgttggcgccgcatctggaaattgtcagttacgtgttgacggggatcgtggcattcctgatgtgtatccaggcaaagcagctattgctttcttttgttccgggaacatttatcggcgcctgcgcgacatttgcagggcagggtgactggcggttggtattaccgtcgctggcgctggggctaatctttggctatgccatgaaaaatagtgggctatggctggcatcacgccgcgagcaacattcagcgaatacggcggtcacaaaataaaaaagcgtggggttcttccccacgctttgtcgtattcatcaggattctggcggtactgacagctcacggtatttcaccagaatatcattttgcctgtccgctttattctgcaaatcccacagtccgcgatcgataccatcattaatgaggaagataacgccggtttcaatggctgacatcagacacagcatcaccggttcgttcgaggtatagccgatttcgccttccagtaagcgctggtaatcaataaaacggaacacgcctgcctgtacttcataggaaaggatcgttttactggtgttcaccgaggaaaggatctcgcccgtactgacgttaaccacgcgcaggttgacagcaatctgatccagctgatactgcgtatcggcgccaataccgaaatatcttgcgccgaccccgccggatttgacgttactttcataaccaataatagaaccttccaccataatatttgccgccgtcagcgactgaagcgggatacggttattcatcgccacggtgccgttttcctgggctgcgcgaataattttccgttcattcaaaagattctgtaagccttgtcgttccagcgggataaaccagcgcgaatctttcagcgcagtgaccaacatagcggtggcgctctgcggcacagccgtagaaaagttacttgccgggtaaggtttaaattggcccgtttcatcctgaatgttatataccgaaacaaagatcttaccggtgggagcaggtaagtgcgtcaaatctttgtaactttgtgcgcggggcattaatgtcggtttcgcagcttgtttcggcggggcagttaagcatccgctcaacaataaaacggcaaccaaaataagtaagcgcggcatgatttatatcctttagtgactgtagcttaaaaatcggttgactgagtttgtaaacctgacacttcgatggtcgaggttcttcccgtttttctgtccgtgacgttgagctggagctgtccgtcgcgattagcgatatcgataataaaatcgttggtcaccatacgtcctggtttcccggtattaatattggtcaacaagccgcccagaatttgcgattgaatagcctgcgtaaagttatccaacgctgagggggtttcgataccaaaatcgttatcataagcggggtctttatatgaattttgcgcctgggcgctattcaataaaaaggaaccgttattggggtttccaccaaagttaggattacggaactggaacgtcatatttccagcccaggttaatggcgaaaaaagcatgagcagcactactgcatgtttaacacgcatgacagcctccggataaaaatcatgttttagaattcatcacgcgctaaatcactcgtacttaatagcgtttgatctatttgtcggcgatttaatgcttcctctgtttgcgctaatgcgaagacgacggttttctcgaagtctcttttcattggaaataaaaaggtctggaaaataacgtcctgatttaccgttatggtgatccagcttccccaacgcgcactgggtctttcattaatggtcagattgccggtgtattcgctttcccatttgtcgctgaatgcacgatagaattcatgtcctatcgaagagacggtctggtcggttaacaatccgggaacctcgacttcaacttcattggcatgcaggtttccggtagcgaacagtaactctgctgctacaatccaggtcagatagcgtttcatggccttaccgcctgagattatcgtttgcccatgaaactgcctgggtgcgatttttgacagctatctttttgaaaagattataaagatgtgtcttaaccgtattctcgctgataaatagcgacctcgcgatttcattattagaggcaccaatacgtaacttattgaggatctctttttcgcgatgagtgagtaatgcggactcggtgctgttgtagcggtaatttcctgagtgcgtaatcaggtaactggctaatttttgtgaaaaatagcattcgccacgcagaataccctgtaatccgctgaccacgtgttcctggtcttcagtagcgtaaaacacgccgttaatatgaggccagttttcaatttcacggtagggataatcgtcaggggtatttaacaataatgtttttatattattgtttttgcggcttaaattatcctgccaatagtggataagcttcttatccgcttccatcatatccattaaaacaatgcaaccggccgagatatcttccagagaacgttgaatattatgcagttttccggttatggccagcgattgctttaaatgttgcaataatgccgtagcttgcagagatggctttgtgatcaacaatagtgtgtgaccatgactactatggacttcattaaacatgatgaaactccactttttttaatcgcacatctgacagctgcccccataaaataaaggcaccagaagtactgacagatgttgcactgctgtgggttgaaatagcccattatccagaaagagaaaaatatttacgaaaatacttttaactgttttcaatctagccattacaaatcttaaagcaagtgttaaacttgtaaccaaatgtaaaaatatatattaaaatgttgtttttgggtttttttgaagtttagatttgatagtaaagttgtacatttcgctgttattgcatagatttaaaaaatcatacaaattataataattcattgatttttaatcattttaattattatatgttatgttttgattttattttttcttaaaatttgagacgtggcattaacctggacagcacaaagacaaaaaaaacgaagtgtgtcacgtcttgtgcgtattgccccacatgggaagcataagaacatccccatggcggcataacacacaccaacacttcattttttaggtgcgcgatacactatcttctgtggccaaaaatcaattataaaaaatcacatggctatcgttttattagcactttggtatgagcttaaataacaaaataccacgcgtgggtgagttattaaaaatgtttccacggacatactcttcatcgtaacgacgcgttaacaaaaaacgcatgtcgctaacaaggtaatagataattttcgctatgtacgaccaggtccagggtgacagcatgaaaaacaaattgttatttatgatgttgacaatactgggtgcgcctgggattgcaaccgcgacaaattatgatctggctcgttcagagtataattttgcggtaaatgaattaagcaagtcttcatttaatcaggcggccattattggtcaagtcggcacggataatagtgccagagtacgccaggaaggatcaaaactattgtccgttatttcacaagaaggaggaaataatcgggcgaaagtcgaccaggcagggaattataactttgcgtatattgagcaaacgggcaatgccaacgatgccagtatatcgcaaagcgcttacggtaatagtgcggctattatccagaaaggttctggaaataaggccaatattacccagtacggtacgcagaaaacagcagttgtagtgcagaaacagtcgcatatggctattcgcgtcacccaacgctaataccgttacgacttttaaatcaatccgatgggggttttaccatgaaacttttaaaagtggcagcattcgcagcaatcgtagtttctggcagtgctctggctggcgtcgttccacaatggggcggcggcggtaatcataacggcggcggcaatagttccggcccggattccacgttgagcatttatcagtacggttccgctaacgctgcgcttgctctgcaaagcgatgcccgtaaatctgaaacgaccattacccagagcggttatggtaacggcgccgatgtaggccagggtgcggataacagtactattgaactgactcagaatggtttcagaaacaatgccaccatcgaccagtggaacgctaaaaactccgatattactgtcggtcaatacggcggtaataacgccgcgctggttaatcagaccgcatctgattccagcgtaatggtgcgtcaggttggttttggcaacaacgccacggctaaccagtattaatttagcgtctgcgctaataaaaaaacagggcataagccctgttttttttcgggaggaaattatgcatactttattgctccttgccgcactttcaaatcagattacgtttaccacgactcagcaaggcgatatttacacggtgatccctcaggtcacattaaacgaaccctgcgtctgtcaggtgcaaattctctctgtgcgcgacggcgtcgggggacaaagccatacacagcaaaaacaaacgctatctttacctgctaatcaaccgattgagttgtctcgtcttagtgtaaatatatcttcagaggactcggttaaaattattgttactgtttcggacggacaatcactgcatttatcacaacaatggccgccttctgcacagtagtttttgatggtggcggaaatggattggctgacctgggtataaagaggcgataaaagcgtctcatcgtctcggcatgtcgctataaggtaacgccgaaccctcgaggatgactaatcattgaggagttaacatgtccgtaatcaagaaaaatatccctgccataggcctgtgtatctgcgctttttttatccattctgcggtagggcaacaaacggtacagggcggcgttatccattttcgcggcgcgattgttgagccactgtgcgatatttctactcacgccgaaaatattgatttaacctgcctacgcgaaggtaaaaagcaaatgcaccggattgaccttcggcaggcatctggattaccgcaggatattcagtccattgcgacggtacggctgcattatctcgatgcgcaaaaaagcctggcggtgatgaatattgagtaccgttaacggcggtgtcatagatataaaaagagcgactctgttgaaagccctgctgtacactttgcagataaggtgagacaaagggggggggttatgacatcacgtcttcaggtcatacagggtgatatcactcaacttagcgtcgatgcgattgtgaatgccgctaacgcatcattaatgggcggcggtggcgtagacggcgcgattcatcgcgcggcggggccggcattgctggacgcctgtaaactcatccgtcagcaacagggcgaatgtcagacgggacatgcggttatcacgcctgctggcaagctttcggcaaaggcggttattcacacagtggggcccgtctggcgaggcggcgaacaccaggaagctgagctactcgaagaggcataccggaattgtttgctgcttgccgaggcgaatcactttcgttccatcgcttttccggcaatcagtaccggcgtttatggctatccacgcgcccaggccgctgaagtcgccgtcaggacggtttcagattttattacccgttacgctctgcctgaacaggtatactttgtctgttatgatgaagaaactgcccggctttacgcaagattacttactcagcaaggcgacgaccctgcctgataaaacacgcctggagcgtgccgttgaaccgctatgcgcgcgccatcccggagagtgcggcattctcgcgctggataacagtctggacgcttttgccgcccgctaccgcctgaccgaaatggcggcgcggacgctggatgtgcagtattatatttgggaagacgatatgtccgggcggctgctcttttcggtactgctgtcggcggcgaagcgcggcgttcatgttcgtctgctgctggatgataacaatacgcctggtctggatgatacgttgcgcttgctggatagccatcctaatatcgaagttcgtctgtttaatcctttctcttttcgtacgctacgcgcgctgggatatttgacggattttgcgcggctgaatcggcggatgcacaataaaagttacactgccgacggcgtagtgacgctggtcggtgggcgcaacatcggcgatgcctatttcggcgctggcgaggagccgctattttccgatctggacgtgatggccattggcccggtggtcaatgatgtcgccaatgattttgaacgttactggcgctgtagttcagtgtcgacattgcagcaagtattatccctttctgagcaggaactgacgcagcgtatcgaacttcccgaatcctggtataacgatgagatcacccgccgttatctgcataagctggaaaccagccagtttatggcggatctcgatcgcggaacgttgccgctgatttgggcaaaaacacgcttgcttagcgatgacccttctaaaggcgaggggaaggcgcagcgccattcgcttcttccgcagcgattatttgacgtgatggggtcgccgacggagcgtatcgacattatttccgcttactttgtccctacgcgcgcaggcgtggcgcagttgcttaatctggtcaggaaaggcgtgaagatcgccatcttaactaactctctggcggccaacgatgtggcggtcgttcacgcagggtacgcgcgctggcgcaagaaattactgcgctatggcgtggagctctacgaactgaaaccgacccgcgaacatgaaaccgccgtacatgatcgcggactcaccgggaactcaggttccagcttacatgctaaaacgttcagtattgatggtagtaaggtgtttatcgggtcgcttaattttgatccccgttcaacgcttttaaataccgaaatgggctttgtcattgaaagtgaaacgctggcgacgcttatccataagcgttttacacagagccaacgcgatgcggcctggcaactgcggctggatcgctggggacgaattaactggatcgatcgtcagcaagaagaggaaaaggtgttaaagaaagaacccgctacgcgtttctggcaacgagttctggtacggttggcggcaattttacctgtggaatggttgctgtgaacccacgcgcggaaaactacccgatcgtggcgcgactttctcgttttaccggcggtttacctgaaaagagaaatttcaggagcgggatgcgtaaatgaatttcatacagaattaacgcaatacccataacaaatatcagcccgcacaagaacccgatcaggttggaggagatatgcggcgtaatatacgcgccaaagaaaagcgttaagggatgatgcaccagatagataaacagcgaagcattcacgaaataggtgacacgcgcggactgaaagtttaacaagcgatgccccagtgaaaataccacgttcaccatccatagccccattaccatcgtaatcacggattcggtttcgtacatccaggcgtcgccgctcccataacgttgattcagcagatacgcgataaaagcaacggcagcgcctaaagtgcatccgcgtgagggcgtggtgaagcgcgctttcagatcggggtgaatgaaggccaacgcgccgagaataaaaaacggcacataaaatagcgtttgcatcacaataaaattgaacatgccgtcactgaggattgccggatatacgatgaatataatgcgcctgatagcagcgtaagccacccccagcaggaaaaaaataagcgaaagtttggccagcgaaatagcggcgggacgaggcttgcttgtttcctgccttttttggaaccaggtaaaaatcccgatgctgacggtggttaatatcaccagcaccagtaaaaaccacagatgtgaaatgagttcccacgctaacgtattatatttttcataggcagagagtgtaggccagttctctgttttctctttgacatattgcaacaggataaattgcggcaaggtaagcaaagggattgcggtaagcatgggaatacccacacgttctacccgtactttccaccagtgttttaatggataacgtaaaaataacatgtacgaaaaataaccagaaataacaaaaaacacctgcatacgaaaagcgtggataaaatcgttaaacagggttagccaccacgatggcgcggcgctattgacatgccaactgtgagtggaatagatcaacgagatatgaaagggaatccctaacaacatcagccatgcgcggatagagtcaagaaaatattcacgcggcgcgggtacagagctcatataaggtcacgtattctcagatttttcaccttatccataaggcgaattatagttacattcggtagcaaccctacaccaactccgacaacctgtctccaggataagcacgcaaagtgaaaacaggcgcgggaggtgcttaatccatgagccagcgcgctgaacaaagcctggattcagttgtcgtaatgcctgattatccattaaaatggatcggatcgatataagcacacaaagggggaagtgcttacttattatgaaacataaacgacaaatgatgaaaatgcgttggttgggcgcagctattatgttaacgctctacgcatcatcgagctgggcgttcagcattgatgacgtggcaaaacaagctcaatctttagccgggaaaggctatgaggcgcctaaaagcaacttgccctccgttttccgcgacatgaaatatgcggattatcagcagatccagtttaacagcgataaagcctactggaacaacttaaagaccccttttaagctcgaattttaccatcaggggatgtacttcgatacgccggtcaagattaacgaagtgacggcgacgacggtcaaaagaatcaaatacagcccggattacttcaattttggcaatgttcagcacgataaagacacggtaaaagatttaggcttcgccgggttcaaagtcctgtaccccattaacagtaaagataagaacgacgaaatcgtcagtatgcttggcgccagctatttccgcgttatcggcgcaggccaggtatatggcttatctgcgcgcggcctggcgattgataccgccttaccatctggtgaagagtttccccgctttcgcgagttctggattgagcgtccaaaacccaccgataagcgtttgaccgtctatgcattactcgattctccgcgcgcgaccggcgcttaccgttttgtgatcattcctggccgcgataccgtggtggacgtgcagtcaaaagtctatctgcgcgataaagtgggcaagctgggcgttgcgccattaaccagtatgttcctgtttgggccaaaccagccgtcgccgacgaccaactatcgtccggaactgcatgactcgaacggcttatccattcatgcgggtaatggcgagtggatttggcgtccgctgaacaatccaaaacacctcgctgtgagcagctatgcaatggaaaaccctcagggattcggcctgttgcagcgtggtcgcgagttctcgcgctttgaagatttagacgatcgctacgacctgcgtccaagcgcctggattaccccgaaaggcgactggggcaaaggtaaggttgaactggttgaaattccgaccaatgatgaaaccaacgataacatcgtcgcttactggactccggatcaactgccggaaccgggtaaagagatgaacttcaagtacactctgaccttcagccgcgatgaagataaacttcatgcgccggataatgcctgggtgctgcaaacacgccgctcaacgggcgacgttaaacagtcaaatctgattcgccagcccgacggcactattgcctttgtggtggatttcgttggcgccgacatgaaaaaactgccgccggatacgcccgtcgctgcgcaaaccagcattggcgataacggtgaaatcgttgacagtaatgtacgctataacccagtcactaaaggctggcgtttaatgctgcgcgtgaaagtcaaagacgcgaagaaaaccacggaaatgcgtgccgcattggtgaatgccgatcagacgctaagtgaaacctggagctaccagttaactgccaatgaataaaacaactgagtatattgacgcattgctgctttctgaacgtgagaaagcggcattgccgaaaactgacatccgcgccgtgcatcaggcgctggatgccgagcatcggacttactcgcgagaagacgattcaccgcagggttccgtaaaagcccgccttgaacacgcctggccggattcattggcgaaggggcagttaattaaagatgatgaagggcgcgatcagttgcaggctatgccaaaagcgacgcgctcttcgatgtttcccgatccctggcgaaccaacccggttggccgtttctgggatcgtctgcgtgggcgggatgtaacgccgcgctatgtttctcgtctgacaaaagaagagcaggcgagcgagcaaaaatggcgtaccgtcggcactatacgccgctatattttgttaattttgactctggcgcaaaccgtcgtcgcgacctggtatatgaagaccattctgccttatcagggatgggcgctcatcaatcctatggatatggtggggcaggatatttgggtctcctttatgcagctcctgccctacatgctgcaaaccggtatcctgattttgtttgccgtgctgttctgctgggtgtcagccggattctggacggcgctgatgggcttcctgcaactgcttatcgggcgcgataagtacagcatctccgcgtctacggttggcgatgagcccctcaatccggaacaccggacggcgctgatcatgcctatctgtaatgaagacgttagtcgcgttttcgccggtctgcgcgcgacctgggagtccgttaaagccacaggcaacgccgcgcatttcgacgtctatatccttagcgacagttataacccggatatctgcgtggcggagcaaaaggcgtggatggagcttatcgcggaagtgcagggcgaaggccaaattttttaccgtcgccgccgccgccgtatgaaacgcaaaagcggcaatattgacgatttttgccgccgctggggcaatcagtacagctatatggtggtgctggacgcggactcagtgatgagcggcgagtgtctgagcggcttggtgcgcctgatggaagcgaatccaaacgccgggattatccagtcttcgccgaaagcgtcggggatggatactctgtatgcccgctgccaacagttcgcgacccgcgtctatgggccgctgtttaccgccgggctgcacttctggcagttgggggagtcgcactactgggggcacaatgccattatccgcgtgaagccgtttatcgagcactgcgctctggcgccgctgccgggagaaggttcgttcgccggatcgattctttcccacgactttgtggaggcggcgctaatgcgtcgggcagggtggggcgtctggattgcctacgatctccccggctcctatgaagagctgccgccaaacctgctggatgagcttaaacgcgaccgccgctggtgtcacggcaacctgatgaactttcgtctgttcctggtgaaaggaatgcacccggtgcatcgcgccgtgttcctgacgggggtaatgtcatatctgtccgcgccgttatggtttatgttcctcgcgctttctaccgcgctgcaggtcgttcatgcgttaacagagccgcaatatttccttcagccgcgccagctttttccggtctggccgcagtggcgtccggaactggcaatcgcgctgtttgcatcaacgatggtgctgctgttcctgccgaagctgctcagtattatgctgatctggtgtaaaggcaccaaagagtatggcggtttctggcgcgttacgctgtcgctgttgctggaagtgctgttctccgtattgctggcgccggtgcgtatgctgtttcataccgtgtttgtggtcagcgcgtttctcggctgggaagtggtctggaactcaccgcaacgcgacgatgattctacgccgtggggagaagcctttatgcgtcacggctctcaactgctgctggggctggtctgggcggtgggtatggcgtggctggatttacgctttctgttctggctggcgccgattgtcttttcgctgattctgtcgccatttgtttcggtgatctccagtcgttcaacggtaggattacgcaccaaacgctggaagctgttcctgatcccggaagagtattcgccgcctcaggtgttggtcgataccgataaatatctggagatgaatcgccgccgtattctggacgatggctttatgcatgcggtatttaacccgtcgcttaatgcgctggcgaccgcgatggccactgcgcgtcaccgcgccagtaaggtactggaaatagcccgcgatcgtcatgtggagcaggcgctaaacgaaacgccggagaaactgaaccgcgatcggcgtctggttttgctcagcgatccggtgacgatggcgcgtttacactatcgggtctggaatgcgccagagagatactcttcctgggtaaaccattatcagtctctcgtcctgaatccgcaggcgttgcagggacgaacatcgtcagcgagataaggtcttcaggtctggagtgaggtgaaaaataccggcgtgatgccggtatttttatagtgaaatgaggtatcaggtgcgtatattcgcggtgagcataatggtgattaccctgagcggctgcggcagtattatcagcagaacgatccccggacaaggacacggcaaccagtattaccctggcgtgcagtgggatatgcgtgattccgcatggcgctatatcactatcctcgatctgcccttctcactgatcttcgatacactgctactgccgctcgatattcaccacgggccttatgagtaattaacgctcatcccattcgtctgccgcagtacggccttcctcggtatcaagcgggggttcaagctggaattccccttcatcccattcatgcaaagtattctcttcctgccactcctggcggatctctatctcatcataatcgccgtcaaacacgctctgcgcggcttcaccactcagcatcggcagacattcgccatcttcaccttcatcggcgaaaaattcgacctgccacatgatgtccccatcctgcagtacatatttctgaacgttgaactgctgcacattcgcttcgtcttgttcgaggcctggatggtcagccagaaattcttcccgggctgcatcgatagcttcttccagcgtggcatacatggtcatcagtgtctccctttgatttgatgaggtatttagggaaagaatagctgattctgtaatattgcaagtatgaaagcgcaaaaattattctattgccagtctgcgccgtcgtaagctgttccatgaatagatagcattgaacaacaccacgcctgccgtgacgcagaatacggcgcggaagccatagctcgcggaaattgcggcgcccatgagagggccggtgacgttgccgatatcgcggaaagattggttgtaactgaatatgcgcccggctatctggttggtagagttgtaaaccagcagagtttgaacggctggcagcagcgcgccatccgccgcgccaagcagaaaccgcaatagcgcgagctgccacggcgtttgcacaaaagacattggaatcagcagcagtacggaaataatcagcgcgacgataagaatcttttccgggccaattctgtcgccaagcttgccgagccggggggcgctaagtaatgccgccacgccgggaacggacgctatcatcccgctaatgaacgcaatattactgacatctcccgccagttcgcgcacatagagcgtcaggatgggcgcaatagaccccgtcgccacctgaataatcagcgtggtgacaaacaggcttaataccaggcggggattttttaacgaggcgaccacttcccgaacgtgaagcatctcttttttgctcaccggcaggaaattctcgcgaatgaaaaagaaggtgagcagaaaacagataaacaaaacgctggcggtaataaaaaagaccggacgaaggccgtaatggtcggcgagcagaccgcccgcaagtgggccaagcagagcgccgctgacgccgccagtagagagcgtccctaacgcccagccgcttttgtggcgcggcacctgagtggcgatgagcgcattggcgttgggaataaatccgcccagcaggcctaataacgcgcggaggatcagaaattgccagatattttgcgccatgcccattaacagcatcacaatggccatgccgagagcggaacgcaacagcatgatcttacgccctttacgatccgccagaccgccccaaaaaggggacgcgatagctgaaaagaggaacgtaatactaaagaccagcccggaccacatgttgagcgcgctatggcctgttacgccgagttgctcaacgtagagagggagaaaaggcatgaccaggctgaatgccgcgccggttaaaaaacagcccagccaggtaacggttagattgcgtttccagtttatggggacatcagagggtgacatagcgttccacagtatgatgcgcggtttgcgctatcatcaatttaattatgagcgtactaattataattatgcgccgaccttaccagcctcgcaatgtggggagcttttaaagctaaaagaggggaaaaattgcagcctgacggctgcaatcctgtcaatagcgcgacggtacgccttcagggcgagttttaaagcggcgatgcagccacatatactgctctggcgccatcataatgcactgctcaacaatcttattcatccatgcggcagtcgcttctgcgctctccagcggaggcgaatattccgcaggaagaatgatcagttcgtagcctttcccatcgggtttacggcgaggcacgaaggggataatacaggctttagacatgcgcgcgagcatccaggtaccggaggtcgtggcagcctggtcgacagcgaataatggtacaaaaacgctggcgcgcgggccataatcgtgatccggcgcataccagatcaattcgccgcttttcaatgccttaaccatgcctttcagatctttgcgatccaacattgatttattggagcgtaagcgtccccaggtctgtaaccagtcgagcaacggattatcattcgggcgataaactccgatacccgggttatgcataccaaacatgcgggcgccaaactcaagggtaaggaaatgtattcctaccagaatgaaccccagtccctgcgccttaacttcacggatatgctccagaccgctcgcttccatccagcggttcactcgccgatcgggccagaaccaggccatgccggtttccatcacgcccataccgacggattcaaagtttttgaccaccatggtgtggcgttcctgcgcgctcatttccggaaagcataattcaaggttgcgataggcgatttttgcgcggcgtttcattacgcgtcgcgccaggtggcccaatgcgcaacccaatttatagatgaccgggtaggggagttgcacgaccaaccaaagcgcgcctatacccaaccaggttaaccaatagcgcgggtgcagtaaggccacggagaacttaggcaacttcgtcatttctatcctgtccttcaacgaacaattccccgtattctcgcatctttttgcgttgagcaaaaatatgtagcaggagagtggcgattaaatcgacaattgttgttaattatttagtgtaaagcaggaaatgtagcgcaaaatgtgtggatgtaaattggcgagacttgccttatcatgcctgcccactttattttttgctgattgcaggatacgtacaccatgccagtgttacacaaccgcatctctaatgacgagctgaaagccaaaatgctggcggaaagcgagccgcgtacgacaatttctttttataaatatttcactatcgcctctccgcaacagacgcgggacgcgttgtatcaggtgtttacggcgttggacgtttttggtcgcgtttacctggcgcatgaaggcatcaatgcgcaaatcagcgtgccgcaaagcaagctcgagacgtttcgtcaacagctttatacgttcgaccccgcgctggacggggtgcgtttaaatatcgcgctggaggatgacggaaagtcattttgggtgctgcgtatgaaagttcgcgaccgtatcgttgctgacggtattgacgatccgacttttgacgccagtaatgtcggcgattatctgaaggcggcagatgtgaatgcgatgctggacgatcctgacgcggtctttattgatatgcgcaaccactatgagtatgaagtcggccatttcgaaaatgctctggaaatcccggcggatacgtttcgtgaacagttgccaaaagcggttgaaatgctgcgggaacatgcagataaaaagatagtgatgtactgtaccggcggtattcgttgtgagaaagccagcgcctggatgaaacacaacggtttcaataaagtctggcatattgagggtggcatcattgagtacgcccgtcgcgcgcgcgcgcaggggcttcccgttcgctttatcggcaaaaactttgtatttgatgagcgaatgggcgaacgaatctcggatgaggttatcgcgcattgccatcagtgcggcgcgtcctgcgatagccataccaactgcaaaaatgacggttgccatctgctgtttatccagtgtccgcagtgcgccagtaaatttaacggctgctgtagtgaacaatgctgtgaagagttggccttgccggaggaagaacagcgccgacgtcgcgcgggtcgcgagaacggcaacaaaatttttaataaatcgcgtggtcggcttaatagcaaactgagcattcccgatccggctgagtaatattttgccggatagcggcgtaaaggccgctatccggcatttcgccaggcgttacttctgctgaacgccttctactgagatgataagctcaacctcttgtgaggccgggccgagatcggtagttatattgaaatccttcagcttaatttttccttcggcctcaaagcccgcgcgcttaccgccccacggatcgtcgccctggcccatcagcttcgcttccagcgtcaccggtttagtcacgccattgagcgtcagattgccggtaatatccagttcatcgccctcttttttcacgctggtagaggtgaaggttgcctgcgggaatttcgcaacattaagaaattccgcgctacgcaggtgtttgtcacgttcggcatggttagtgtcgacgctattggtgttaatggtcacgttcactttgtctgccgacggatttttttcgtcaaaagtgaacgtgccgtcgaaatctttaaaggtgccgtatagccagctgtagcccagatgctgaatgcggaaattgacgaacgcatgttggccttctttatcaattttatactccgccgccacggcggaaccggtcgtgaataacaaggatgcgagggtgaatcccagcaggttttttttcatttttgagctccatagtcagatgacgacattcctgtcatacgtttcagagtgtcgtctttatcgatgaaatggtgttttagcgccataaccccatgcgagagcgagataatgaccagcgaccaggcaaaccacagatgcagtgttccggcgatgtcagcctgcgcgcccgcgtccgtaagcgtggccggaatctcaaaccagccaaagacgctaatcggtttaccgtcggcggtggaaatcaggtagccgctaatgattatcgcaaagagcaggagataaaggaggagatgacctgcggcggcgccaatgcgcgttaaacgggaatagctggtcaacgcaacgggcggcggcgaataaagccgccagataatacgcacgatcagcgccatcatcagtaatatgccaatacttttatgtatttccggcgcctggtgataccagccgtcgtaataactgagcgtgaccatccataagcccaacgcaaacatgccatagaccaccagggcggtcagccagtggagcgcggcggaaaccacgccataacgctgtggagtatttttaaattgcataaacacaccaatgaatatttcacgagagaatgaaaatggcgtggaaaagcgccgaatgcaacttataaataagaatttgaatgatatttatttttatttcaataattttgatgttgtttgcggttcagcttcagaagtttcgagatatttccccctgataaccgcgcaacggcaagaactggcattattgccgtgcttcaacgttatgaaataaaaagtgaggaattttcaggaagtgtcagttaacgtcaatgaaaagcaatcagaagaaaaggagataaacaatatccatcaccgccagcagcgaccaaagaataacgtaaagcatgaaatgttcgcgaatattattcatcagaaaatgaaagagacgacgcatagcttaccttaataaacagcccctttacggggccgacaaattattggctaaaacgggaaagccggaacggcgtcagatcaaaggagggcgtttttcccaacgcaaaatccgcagcgatttctcctaacaccggggcgaatttaaaaccatgtccgctgagtccagtgatgacaagcgtgttctcatggccaggcagcgtatcgataataaaatcctcgtccggcgaattatcataggtacatgccgccccatgtaaacaaccgccgatacccggcagtacgttacgcaggaaaggaaatgcttccgcgccatcgctggcaacggcggcaaagggcttgcgctcttccggagcttgtattagctgtccgccattgtgtttgccgatttttaactcgtcgttctccgccgggaagccgtaatattgatcgccgttgggcatttcgccggtaaaggccggaaagcggtttttagtgctgtaacgcccatccgccttaaaccaggcaaaaactttacgtacgggctgaacgggcagctccggtaccagcgctttgacccaggtgcccgcgctaatcagcgccttgctggcgtggtagcagccttcactcgtctctatcgtcacaccgttatcatcatggtgaatatggcttaccgggctgttaaatagctgtgcgcagcctgcctctcgggccagacgaagccatgtggtaatggctaattcgctgcgcaggaaaccggagtcagcttcaaacagcccgatataattatcgggcacgcgaatttccggccagcgcgtcatgagggccgtcgcgtccaggcgctcgacgttcaattgccactgttgcgcgcttcgtgcgacgttggctaagaaagcggaatcggccgggccgaggttgacgacgccggagcggacaaaaataggctcttcattgtgtgtggagagttcatcccaaagcgtctgggcgcgaagcaccagcgggacatatttttcgccttcaccataagcgtggcggataagacgggtatcgccgtggtggctgccctgttgatgaggcggcatatgcgcatcggtcatcaggacctttagcccggcgcgggtggcgtaataaccagcggcggcgccaaccgaaccgctgccgataataataaggtcgtatttcatcagcttctctctgctatcgcgatgatttcagggtaaataactgcgctgagatatacaagccagaaataagtgaggcaccttacggtgcctgagagagggggagcgcgtcacgctaatggcgacgatactcgttttcctggtaatcgcctgattctattttggcgatgccggcttctaatattgaaataaattgcctggctacatctgttgttaaccagagcgtttgaccaacttcagtcccttccggttccggacgatttggggtctggtagtgtaaacgcagcatcagcgcatcatagctatcgacggtgctgatgtcccatcctacaagcggatgggtctgaatgacttcattattcttttccatcatgcccccctggtacgtgttataagacaacggttctcgaggttcaatgcgtgtttttcttctgaagcaacttcagtataccaattaataaggctattcactgcgtttttaaagagaccggaggataaatttctctttttaagaattatatgaacaataaagcggcagttcattcatatttttttaggatgttgtgcaattattttgagggtcaggtgaaatattcatcagttgcgcaaataaaaaagccggggcgacccggcaaacatacatcactgcatatcattttttattcattgatgaaccagtcatcagcgctctcccaggtctcctggagaatctcgctaatgcgttctttgtcctcttttgatgcgccaatgacggacaagttgttggcggtagcgtaacgcacggtgacgttacccaaattctccggaaaatgatggctaatacggcgggagagttcgcccgccagcgcatcaatcgcaccggcaggcagaggtgacgttttggctatagtgacttcaatacgcataatggccccctgttgaatatactggatatatatacagttaaatccagtatatagcaacaggtaagcgcattttttatttttttactgaccagcgtactgtttcacccgctaaaaaaggcaccagagaatcatcagccagcgcgatatttcccggtatctgttgttcatcgcgaaccagttccacccaccccgtattcatcggcaggccatagaattgcgggccattcagtgaacagaacgcttcaaagtgcgccagcgcgttcatttcctcaaacacggcggcataactgccaagggcggagggggcgttgaaacaaccggcgcagccgcaactggtctctttacgatgacgtgaatgcggcgctgaatccgtccccaggaaggcgcgcgtaaaaccactggcaaccagttcgcgtaacgcctgctggtgaatattgcgtttcagaatcggcagacagtacaggtgaggacgaatgccgccgaccagcatatcattacggttaaacattaaatgttgaggcgtaatggtagccgccaggtagtcgttgccgtcacgtacatactgcgcggcatctttggtcgtgatgtgctcaaagaccactttaagcgcggtcagacgctggcgtagcggttccattacggtgtcgataaaacgcgcttcacgatcgaatatatcaacatccgcatgggtcacctccccgtggaccagcaatggtattccgagtttttccatccgctccagtaccggcatgatagcgtcgactgacgttacgccatgactggagttagtggtggcattggccgggtaaagcttagccgcagtaaatacgccttcatggaaaccacgctccagttcatcggcatcgagcgaatccgttaaatagcaggtcattaacggcgtgaaatcatgcccggcgggcaccgcatcgagaatacgctggcggtaggcgatcgctgcatcaacggtcgtgatgggggacgccaggttcggcatcacgatagcgcgaccataaatttcgctggtatagggtacgaccgtttttaacatgtcgccatcgcgaaggtgaacgtgccagtcgtccgggcggcggatctttaaaacctgggatggtgcagtcattaataagctccggctgaggaatagtctttttgccggaaacaaaggataagcggaaacgttttcgtttgcacgtaaaaaaaagggcgcgagcgcgccctccgaaatcaattggtgaaaggaataacgatttcaccaggtttaacttcaatgcctttcgcgagtttctttgctaacgcttcgcctttactgctgtcctcacgcaacacgtaagcgggccgctggttaaagtagctacgtaaagactgatttaaataaggcaggagcgtttgtagcaccgattgcattttctccggcgtcacggtggcgtctactacttccatctcctgaagatagatggcgcctttttctttatcaaagaccggcagggcttttagcttgagtttcatcgtcgctttttgactgccaaacagggaattcatatccagcctggcatcgccagtaagggtgactttattaggttcttcccgaccaatctggctgacaaggttagtcaatacgatatgcgcgtcggcaatgccgggcagaccaatatcttttgagaaattattccgtttttcaagcgcttgattgatttcttgttcgctaatggtgtattgcgtaagttgattacaacccactaacaggccgctaactaccagcgcagcggcaaaaaaaaactttttcatggcgttccttagcatgttgcctgtaccctaatcttgacacaaagcagcatgtcgcgccagcggacatggtgccactagaaaaagctgaaaaaggcggcaagaaagggttgccgcctggcgggagttagatagccattgaggagagtaaattaatttgcgtctgctttgccatattatcgcgatagtccgcgacttttgtcggccagtggataccggcgaccagcgtcagattacgcagaagcggaaacagatgaatatcatcttccgataattcgccgttaacggcgttaggctgtacgatgagtttatccagcaaacgtaaatcatcgccgatctttttaatcagtcctgcagagtgcgcaagatggttgtcaaaactgccagatgaggcttcttttttgcggataaaatactgacgcgccgcaggggtagaaaattcatcgaaagcggattttgcaaatcgcggcagcagtagctgattaacgtaaccgttaactttgcgcaaccactcttcaatggctggattgcgtttcccggttaacagcggtttgccgtcgaggttgtcgacataatgtacaatatccatactttcaggaaggtagcgactatcatctttttgcaggatgggcaccatcttttgaccaatcatccgggtgggcgtcgcctcgtcgtcattttgtaacacgttaagttcaacggggatgttcttcaggccgaaaatcatgcgggctttaacgcagaaagggcaatgatcgtaaatataaagcttcacgtttctcctccatttgactgtcggtatctgaccagtatggaggagatagcgacaggtatcaaatcaggcgccgggttccagcatccggcgcggcgtgcgtttatgactaaattgccagcctaaagccaaaaaggtgataaagccgataataccgagcatcatccacggtagttcaggctgcgcaagcgctttccccatatcaaacaaccagccgccgccgatataaccaatcgcgccgccaatggctaatcccagacggctaaagcccatatagcttccccgcgccctcgcgtctgcgagcgacgcgctgagcgtttcgcgcgccggttcggcgataaccgagccgatgtagaaagcgcaaataagcgtaaaaagctgctgtaaattgcccaccatcccgatggggagcatgctcagcgacatgacgagcaaaccggccatcagccgatgctccagccgaaaacgcttttcgctccagcgggcaatcgggtagagcaacgtcagcgagagacacgcctcaatagcgtacatccatttcacggcagcaggcgaaccggcgatatcgtttaccataatcggcagcattaacatgacctgtaccgccagcatatagtagcccgccagcgtcagcacgtaggttacaaaccttttatcgctcatgacgcggcgcattccttcacgcaccggcgttctgaccgttgatagcttccaggccggaagcagccatgcgttgaaaagggcgcataatatgaacaaaatagcgcccgtcgcgcagaccaggcgaaaatcgtattgtagcaaccagcttcccagcagcgcgccaatcaccgcacccgcgctgtcctgcatcatcaacagagagaagaagcggccccgttgctccggacgaattaatttgaccaccagcgctgaacgcggcgggtcgaaaagcgtaccgccgagaccggaaagaaagcaggaaaaccacaagagccagggctcatgcgcgatacccatggtggcaaagcctgcggcgcgcatcagcataccggtgacaatcatcggtttcgcgccaaagcgatcggcgatggcgccgccaaaaatgcccagaccttgttgaataaactggcgcaggccgagcgcgatccctaccattacggcagcccaccccatttgatcgacaaagcgaatagagatgagcgggaagacgacgaaaaaacccagcaccaccaacatgttatcgatgagaagaaaatatttacccaggttcctcgcctgcgagacgcgcgacatttcccctcccgggaaataaaagatgagcgtcttctattctgcggcggcgtttcgttttttcctaccgttagcgggacaatatttttttatcaaaagtcctttttaatcgagagttttcatcaaaatgtggcagcaattcaaaaaatgacgatttgcgcttttcacagagcctggttgcgcaggtatagtaatgttactggcgtgctgaagacgttacaggaaggagtaggtatagaatgtttggctatcgtagtaacgtgccaaaagtgcgcttaaccaccgatcgtctggtggtacgtttagtgcatgagcgtgatgcctggcgtctggccgattattacgcggaaaatcgtcattttttaaaaccctgggaaccggtccgtgatgaaagtcattgttatccttcaggatggcaggcgcgtctgggaatgatcggtgaatttcacaaacagggctccgccttctatttcgcgctacttgatccggaagaaaaagaaattatcggcgtggcgaatttttccaatgtggtgcgcggttcttttcatgcctgttatctgggctattccattgcgcagaagtggcaggggcaagggctgatgtttgaagccttaaccgctgcgattcgctatatgcagcgcactcagcatatccaccgtatcatggcgaactatatgccgcacaacaaacgtagcggcgcgttgctggcgcggcttggctttgaaaaagaaggctatgcgaaagattacctgttgattgatggacaatggcgcgaccatgtcctgacggcgttaaccacgccgttatggacgccggggcgttgagcggcttacggaatgagaggcaaagggagaaaacgatgaaatatgaattaaccgccactgaagcgcgagtgattggctgtctgctggaaaagcaggtgacaacgccggaacagtatccgctttccgtcaacggcgtggtgacagcctgtaatcagaaaaccaaccgtgaaccggtgatgaacctgacggaacaagaggtacaagaacagctcgataacctggtgaaacgccactttttgcgtacggtcagcgggtttggcaaccgcgtcaccaaatatgaacagcgtttctgtaattccgaatttggcgatctgaaacttagcgcggcggaagtggcgctcgtcactacgctgctgctgcgtggcgcgcaaacgcccggcgagttgcgtagccgggcgtcgcggatgcatgaattcagcgatatggcggaagttgaatccacgctggaacggcttgccagtcgtgaggacggcccgtatgtcgtccgtctggcgcgtgaaccgggtaagcgcgaaagccgctatatgcaccttttttgcggcgacgtcgatgaactgtctctccagacgtctgcgccggaaagtgcgtcgggcgatcttcagtcgcgcgtcgaagcgctggaaagcgaagtggcggagttaaagcagcggctggattctttgttagctcacctgggagagtaatgtgagaacattacggattggcattgtcgggttaggcggtattgcgcagaaggcctggctgccggtattaaccaacaccgccggatggacgttacagggcgcctggtctccttcgcgggataaagccttacgtatttgcgaaagctggcgcataccgtatgtggattcgctggcgaatttagcgtccggctgcgatgcggtctttgtccactccagtaccgcaagccattatgccgtggtcagcgaacttctcaatgccggcgtccatgtctgcgtggataaaccgctggcggaaaatctacgtgatgccgaacggctggtggcgctggcggcgcaaaaaaaattgacgctgatggttggctttaatcgccgtttcgcgccgctgtaccgcgaactgaagacgcgcctcggcactgcggcgtcactacgtatggataaacatcgtaccgatagcgtcgggccgcacgacttacgttttactttgctcgatgactatctgcatgtcgtggataccgctctgtggctggcgggcggcgaggcgcgccttgccagcggcacgttgctcaccagcgagtccggcgaaatgtgctatgcggaacatcatttttccgccgacaaactacaaattaccaccagtatgcaccggcgcgccggaagtcagcgtgaatcggtccaggccgtcaccgacggcgggctatatgacgtgacggatatgcgtgaatggcgcgaagagcgcgggcagggtattctcatcaaacccattcctagttggcaaacgacgcttgaacagcgtggttttgtcggatgcgcgcggcatttcattgactgcgtacaaaatcagacggttccggaaacggcgggggagcaggcgattttggcccagcgcgtcgtggaggcgctgtggcgggacgccatcagcgaataaccctctgtaacatctggcggtagtaattcatcgtaatccaggtactataccctcaataattcgagttgcagaaaagctaacgcacatgcagctcgaagtatggcgggtatatatgcccactctacacaatacctcttttcacagtgaataatggcaaaccgtggggagtctgtaaggcctgataagacgttttaacgtcgccgtcaggcgcggtgatacagccggatacggcagaagttgcgttatccggtcgatggatcagccatgcaggagttttacgccagggtctggaatacaaaagaaatgaatttattgaaatcgctggctgccgtcagctcgatgactatgttttcacgcgtgttgggctttgcccgtgatgcgattgtcgccagaatttttggcgcagggatggcgaccgacgccttttttgtggcgtttaaactccctaatttactacgccggatctttgccgaaggcgctttttctcaggcctttgtgcctatcctggcggaatataagagcaagcagggtgaagaagcgacgcggatctttgtcgcttacgtttccggcctgttgacgctggcattggccgtcgtgacggtggccggtatgctggccgccccgtgggtgattatggtaaccgcgccgggttttgccgatactgcggataaattcgcgctgacgacgcaactgctgcggattacatttccctatattctgctgatctcgctggcttcactggttggcgccattctcaacacctggaatcgcttctctattcccgcttttgcgccgacatttcttaatatcagcatgatcggttttgcattattcgccgcgccatactttaatccgccggtgctggcgttagcctgggcagtcaccgttggcggcgtgctgcaactggtgtatcaacttccgtatttgaaaaagatcggtatgctggtgctgccgcgcattaactttcgcgacaccggggcgatgcgggtggtcaaacagatggggccggcgattttgggcgtttccgtcagtcagatctcccttatcatcaataccattttcgcctcgtttctggcctccggctcggtctcatggatgtactatgccgatcggttgatggagttcccgtccggcgtgctgggcgtggcgttggggaccatcttgttgccgtcattgtcgaaaagctttgccagcggcaatcatgatgagtactgccgcctgatggactgggggctgcgtttgtgctttttactggcgttgccgagcgcggtagcgttaggcattctggcgaagccgctgacggtctcgctgtttcagtacggtaaattcaccgcctttgatgcggcgatgacgcagcgggcgttaatcgcctattcggtggggctgattggcttgatcgtcgtaaaagtgctggctccgggcttctattctcgccaggatattaaaacgccggtgaaaatcgccatagtgacgttaatcatgacgcagttaatgaacctggcgtttattggaccgctgaaacacgccgggctgtcgctctctattggtttggcggcatgtctcaatgcgtcgctgctgtactggcaactgcgcaaacagaatatctttacgccacaaccgggctggatgtggttcctgatgcgtctgatcatttccgtactggtgatggccgccgtattgttcggcgtgttgcatattatgccggagtggtcgcaagggtcgatgctatggcgtttgctgcgtttgatggcggtagtgatcgcgggtatcgcggcctatttcgccgcgcttgccgtgctgggctttaaagtgaaagagtttgttcgccggacggcgtaaattcagtgcctgatagcgctgtgctatcaggcctacaaggcattcaggccggaaaggcgcaacgtcgccatccggcaatgattagatagaaatttttttaccgccgcggtgagagacggaagtctgaccgtcagccccgtacaaggtcggctcctggtgaggtttcagcacctccagcgcctgttgattacgctcgatttgcccttccagcagccagccgttgtgctggttgaggtcgcgaagatgctgcgttttttcggtaatcgcctgccagcgctctgcaatgtcatcgtttgcgctacgctgcgcattctgctccagacggcgctgttgttccagataatccagcgtcgccagcaacgagcttttttcttctgtaatacgctgtagctggctgccgttaatctggcctacggaaagctgttgttgctcggcgtccatcaccgtcttcaggtcattcaggacggtggtcatctggtcaagtatttctgacaaacgagtcatacgcttatttactctgtaagtagctctgcgcctcgcgaatgagcgagtctgctatttttcccgtatccatttttaactcaccgttacggatagccgtttttaatgcttcgacgcgttccatattaatgtcgctgacgcctggctgcatgagcttcgcttgcgcgtcgcttaacgttacgctggcgctcgtcgcggcggacgttttttcctgacgcgttttttgtaccggcgtgtcgctggtttcgcgcgtctggacagtgctaacgggtttcaaaggtgaggtacggtcaatgctcatttatttatcctcatcgagggttacgttgtagcggccagctaccatcatggttgaatatctcatcggcagccgcgacaaaatctttacacaattataggttaataagaatattcccatcagaatcgacggttccactcacgatttgacccgatgtcatgcgcacgcgcgcattttgcgcgacggcagcattattcatcgcctgaccttccgcattgacgctgaacccctcgccattggcgatgacctgtactcgttgccccgctttgacgcgccaggcctgacgtatcatcgtaagctgtaccggctgcccgggagcgagatcgcgcaaactgacggcatcctgaatctgacggatatccagtaccgtccgcggcggtaactgatccagcctgccacgttttagcgtgacgttggccggcgtcaattttccgccgcgcgcgatgggcgcggcaacggcgacataattgccggtcgcttgcacattcacctgcaaataacgtttttcattggcgcagcgcgccaccacattgacgttgccccacagcttcgcgctgcccgtcatgctgaaggctggctgttcgcagctcggtagcagattgggcgatgaacggagcgtgacaaccacctcgtcgctgaagccagccagacgctgggaaaaccacgtggtcagctgggcgttgatgtcctgcgccattgtcagggggctgaacagcaaagccgccacggcgaatcctcgttttaacgtttgcatggtacttccccctggttgatgtcatgacaggattctacccgtgtgaagcaagcatcaacgcaataaatagcgacgcattttgcgtttattccggcgataacgcgcgcgtgaaggcatttaagctgtcggctgaattttgccatttgcggaggagatatgctcgacaggctcgatgccgccttacgatttcagcaggaagcgctaaatctgcgcgcgcaacgtcaggaaatattagcggcgaatatcgccaatgccgatacgccggggtatcaggcgcgcgatattgattttgccagtgagttaaaaaaggtgatggtgcgtggacgggaagaaaccggcggcgtcgcgttaacgttgacttcctctcaccatattcccgcccaggcggtctcttctcccgcagtggatctgctttatcgcgtacccgatcagccttctttggatggtaataccgtagatatggacagggaacgtacgcagtttgcggataacagtctcaaatatcagatggggcttaccgttctgggtagccaactcaaaggcatgatgaatgtgctacagggaggaaactaattcgtggcgctgttaaacatttttgatattgccggatcggcgcttgccgcacagtccaaacggttgaacgttgcggccagtaacctggcgaatgcggatagcgtcaccggcccggacggacagccttatcgcgccaaacaggtggtttttcaggtggacgccgcgccgggtcaagccactggcggggtaaaggtcgccagcgtgattgaaagtcaggcaccggaaaagctggtttatgagccaggcaatccgctggcggacgctaatggttacgtcaaaatgcccaacgtcgatgtggtcggcgaaatggtcaacacgatgtcagcctcgcgcagctatcaggcaaatatcgaagtcctgaataccgtaaaaagcatgatgcttaaaacgctgacattaggccagtaaaggaggcgcgtatgtctattgccgtaaatatgaatgacccgaccaacacgggcgtcaaaacgacgaccggcagcggatcgatgaccggaagcaacgctgccgatctgcaaagcagtttcctgaccttactggtcgcgcaattgaagaaccaggacccgactaacccattacaaaataatgagttaacgacacagttggcgcaaatcagtaccgtgagcggcattgaaaaactgaatacgacgctgggggctatttccgggcaaatcgataatagtcagtccctacaggcgaccacgctgattggacatggcgttatggtgcctggcaccacaattctggcgggtaaaggcgcggaagaaggggccgtgacgtccacgacgccgtttggcgtggaattgcaacagcctgcggacaaagtgacggcaaccattaccgataaagatggccgggtggtacggacgctggagatcggtgagttgcgagccggggtacacacctttacctgggatggtaagcaaacggacggaacaacggtaccgaatggttcttacaacattgcgattaccgccagcaatggcgggacgcaactggtggcgcagccgctgcaattcgctctggtacagggcgtgacgaagggcagtaacggcaacctgttggatctgggtacctacggcaccaccacactcgacgaagttcggcaaataatctaagcccttacacttatcaggagtcagtcatgtctttttctcaagcggttagcggcctgaacgctgcggccaccaaccttgatgttatcggtaataacatcgccaactccgccacctatggctttaagtccggtacggcatcatttgccgatatgttcgccggttccaaagtggggctgggcgtaaaagtggcggggattacccaggattttaccgacggtacgacaacgaacaccgggcgcgggctggatgtcgcgattagccagaacggttttttccgcctggtagacagcaacggttccgtgttctatagccgcaacggccagttcaaactggacgagaaccgtaacctggtcaatatgcaggggatgcagttgaccggctatccggccaccggtacgccgccgaccattcagcagggggcgaatcctgcgccgatcaccattccgaacacgctgatggcggcgaaatcgaccaccaccgcgtcaatgcagatcaacctgaactcaacggaccctgtaccgtctaaaacgccctttagcgtgagtgatgcggattcgtataacaaaaaaggcaccgtcaccgtttatgacagccagggtaatgcccatgacatgaacgtctattttgtgaaaaccaaagataatgaatgggccgtgtacacccatgacagcagcgatcctgcagccactgcgccaacaacggcgtccactacgctgaaattcaatgaaaacgggattctggagtctggcggtacggtgaacatcaccaccggtacgattaatggcgcgacagcggccaccttctccctcagcttccttaactccatgcagcagaacaccggggctaataacatcgtcgccaccaatcaaaacggctataagccgggcgacctggtgagctaccagattaacaacgacggcaccgtggttggcaactactccaacgagcaggagcaggtgctggggcagattgtgctggctaacttcgccaacaacgaaggtctggcatcccagggcgataacgtctgggcggcgacgcaggcttccggggttgcgctgctggggactgccggttccggcaacttcggtaagctgacgaacggcgcgctggaagcctctaacgtggatttgagtaaagagctggtgaatatgatcgtcgcgcagcgtaactaccagtcgaatgcgcagaccatcaaaacccaggaccagatcctcaatacgctggttaacctgcgctaagcgcctgacgggatagcttaatggatcacgcaatttataccgccatgggggcggccagccagacgcttaaccagcaggcggtaacggccagcaacctggctaatgcctcaacgccgggctttcgcgcgcagcttaacgcgctacgcgcggtgcccgttgatggcctctctttagcaacgcgcacgctggttacggcgtcgacgccgggggcggatatgaccccgggtcagttggactacacctcccgtccgctggatgtcgcgttacagcaggacggctggctggtagtgcaagcggcggatggcgctgaaggatatacccgtaacgggaatatccaggtgggtccgaccgggcagttaaccattcagggacatccggttatcggcgaaggcggcccgattaccgttcctgaagggtcggaaatcaccattgcggcagacggcacgatctccgcgctcaatcccggcgacccgccaaacacggtggcgcccgttgggcgactgaagctggtcaaagcggaaggcaatgaggtgcagcggagcgatgacggtttattccgccttaccgccgaggcacaggctgaacgcggggcggtactggccgccgacccgtcaattcgcattatgtcgggcgtgctggagggcagtaacgtcaagccggttgaagccatgaccgacatgatcgccaacgcacgtcgttttgaaatgcagatgaaggttatcaccagcgtagatgagaacgaagggcgagctaaccaactgctgtcgatgagttaatacaggacattttatgatcagttcattatggatcgccaaaaccggtctggacgcgcagcaaaccaatatggatgtgattgccaataacctggcaaacgtcagcaccaatggttttaagcgtcagcgcgcggtatttgaagatctgttgtatcagaccatccgccagccgggcgcgcagtcgtccgagcagacgacgctgccttcagggctgcaaatcggtaccggcgtgcgtccggtcgccacggagcgtctgcacagtcaggggaacctgtcgcagaccaacaacagtaaagatgtggcgattaaagggcagggctttttccaggtcatgctgccggacggtacgtctgcttatacccgcgacggctctttccaggtggatcagaatggtcaactggtgacggcgggcggttttcaggtgcagccggcaatcaccattccggccaacgcgttaagcatcacgattggccgcgacggcgtggtcagcgttacccagcaggggcaggccgcgccggttcaggtcgggcagcttaacctgaccacctttatgaacgacaccgggctggaaagcattggcgagaacctctatatcgaaacgcaatcgtccggcgcgccgaacgaaagcacgccggggctcaacggcgcggggttgttgtatcaagggtatgtcgaaacgtcgaacgttaacgtggcggaagagctggtgaacatgattcaggttcaacgcgcctatgaaattaacagtaaagcagtatcgacgaccgatcagatgctgcagaaactgacgcaactctaaggggccgccggtgggggatacgccaccggctccctgattttgaagatgaaggtaatgcaaaaatacgcgcttcacgcttacccagttatggccctgatggtcgcgacgctgacaggatgcgcctggatacccgctaaaccgcttgtgcagggggcgaccacggcgcagccgatacctggcccggtaccggtggcgaatggctccatatttcagtctgcgcagccgattaattatggctatcagccgctttttgaagatcgtcgaccgcgtaatatcggcgatacgctcacgattgtgttacaggaaaacgtcagcgccagtaaaagctcgtcggcaaatgccagccgcgacggcaaaaccagttttggttttgatacggtaccgcgttatctgcagggattattcggtaattcccgcgcggatatggaggcctccggcggcaactcttttaacggcaaaggcggcgcgaatgccagcaatacctttagcggcacgctgaccgtgaccgtcgatcaggttctggccaatggcaatttacacgtcgtgggggaaaaacagatcgcgattaatcagggaacggaattcatccgcttctccggcgtggtaaatccacgcaccatcagcggcagcaactctgttccctcgacacaggtggcggatgcgcggattgaatatgtcgggaacggctatattaacgaagcgcaaaatatgggctggctgcaacgtttcttccttaatttgtcgccgatgtaagcgaggtgtatgtgtttaaagctcttgcaggaatcgttctggcactggttgccactctggcgcacgccgagcgtatccgggatctgaccagtgtccagggagtacgggaaaactcgctgatcggctacgggctggtggtcgggttggacggtacgggcgaccagacgacccagacgccatttaccactcagacgctgaataacatgctgtcacaactggggattacggtccccaccggcaccaatatgcagttgaaaaacgtggcggcggtgatggtgacggcgtcgtatccgccttttgcgcgacagggacaaacgatcgatgtcgttgtttcctcaatggggaacgctaaaagtctgcgtggcgggacgttattaatgacgccgttaaaaggggtggacagccaggtgtatgctttggcgcagggcaatattctggtcggtggcgcgggcgcttccgcaggcggcagtagcgtgcaggttaaccagcttaatggcgggcgcatcactaacggcgcgattatcgaacgcgagttgccgactcagttcggcgctggcaacaccattaatctgcaattgaacgacgaagattttacgatggcgcagcaaattaccgacgccatcaaccgcgcgcgcggttacggcagcgccactgcgcttgatgcgcgaacggtacaggtacgcgtgcccagcggcaacagctcgcaggtgcgttttctggcggacattcaaaatatggaagtcaacgtgacgccgcaggatgcaaaagtcgtgatcaactcgcgtaccggttcggtggtcatgaatcgggaagtcacgctggatagctgcgctgtggcgcagggcaatttgtcagtgacagtcaatcgccagctcaacgtcaaccagccgaatacgccatttggcggcgggcagaccgtggtgacgccacagactcagatagatttgcgtcagagcggcggatcgctacagagcgtgcgttccagcgccaatctgaacagcgtagtgcgtgcgctgaatgcgcttggcgcgacgccgatggatctgatgtcgattttgcagtccatgcagagcgcgggctgtctacgcgccaaactggaaatcatctgatgatcggagacggtaaattgctggccagcgcggcctgggatgcgcaatctctgaacgaactgaaagcgaaagcgggccaggacccggcggcgaatatccgtcctgtggcccgtcaggtggaagggatgtttgtgcagatgatgctgaaaagtatgcgcgaggctttacccaaagatggtttattcagcagcgatcagacgcgtctgtataccagcatgtatgaccagcagatcgcccagcagatgaccgccggtaagggattggggctggcggatatgatggttaaacagatgaccagcgggcagacgatgcctgcggatgacgcgccgcaagtaccgcttaaattctccctggagacggtaaacagctatcaaaatcaggcgctgacccaactggtgcgcaaagccataccgaaaacgccggacagcagcgatgcgccgctctccggcgacagtaaagactttctggcccggctttcgctccctgcgaggctggccagcgaacaaagcggggtgccgcatcatctgattctggcgcaggcggcactggagtccggctgggggcagcggcaaatcctgcgggagaatggcgaacccagctataacgtatttggcgtgaaagcgaccgccagttggaaagggccggtgacggagatcaccaccactgaatacgaaaatggcgaagcgaaaaaagtgaaagcgaaattccgcgtctatagctcgtatctggaggcattatcggattatgtcgcgctgttaacgcgtaacccacgctacgctgccgtgaccactgccgccacggcagagcagggcgcagtggctctgcaaaacgccggatacgccactgacccgaattacgcgcgtaaattgaccagcatgattcagcagttgaaagcgatgagtgaaaaggtcagcaaaacctacagcgcgaatctcgacaatctcttttaaattgctcaagtccacgtagtcgctgccgataacaacgagtattgaaggattaaaaggaaccatcatgtccagcttgattaatcacgccatgagcggacttaacgccgcgcaggccgcgttaaatacggtcagtaataacatcaacaattataacgttgcgggttatacccggcagacaactattctggcgcaggcaaacagtacgttaggggctggcggctggataggtaatggcgtttacgtttcaggcgtacagcgcgaatatgatgcgtttatcactaatcagctacgcggcgcgcaaaaccagagcagcggcttaaccacgcgctatgaacaaatgtcgaaaatcgacaacctgctggccgataaatccagctcactgtctggttcgttgcagagtttttttaccagcctgcaaacgttagtcagtaacgcggaagatcctgcggcgcgtcaggcgctgattggtaaagcggaagggctggtaaaccagttcaaaaccaccgatcagtatctgcgcgatcaggataaacaggtcaatatcgcgattggctccagcgtggcgcaaatcaacaattacgcgaagcagatagctaacctgaacgatcaaatctcccgtatgacgggcgtaggcgcgggcgcatcgccgaacgacctgctcgatcagcgtgatcagttggtcagcgagcttaacaagatcgttggcgtcgaggtgagtgtacaggacggcggcacctataacctgacgatggccaatggctatacgctggtgcaggggtcgacggcgcgtcagttggcggcggttccctccagcgccgacccgacgcgaacgactgtcgcttatgtcgatgaggccgccggtaacatcgaaattccggaaaagttgctgaacaccggttcgctcggcgggctactgacgttccgttctcaggatctggatcagactcgtaatacgctgggccagttggcgttggcgtttgccgatgcgtttaacgcgcagcataccaaaggttatgacgccgacggcaataaagggaaagacttctttagcattggctcgccggtggtatatagcaacagtaataatgccgataaaacggtatcgctaaccgctaaggtggtcgacagcacgaaggttcaggcgacggattataagattgtttttgacggtacagactggcaggttactcgcactgcggataacaccaccttcacggcgacaaaagatgctgacggaaaactggagattgacggtctgaaagtgacggtagggaccggcgcacagaaaaatgacagttttcttctcaagccggtcagcaatgctatcgtcgacatgaacgttaaagtgacaaatgaagccgagattgcgatggcgtctgagtcaaaactcgatcctgacgtggataccggcgacagcgataaccgcaatggtcaggcattgctggacttacaaaacagcaatgtagtgggcggcaacaaaacttttaacgatgcttacgccacgttggtcagcgatgtgggtaacaaaacgtcaacgctgaaaaccagcagcaccacgcaggcgaatgtggttaaacagctttataaacagcaacagtcggtttccggcgttaacctcgacgaagagtacggcaatttgcagcgttatcagcagtattatctggcgaatgcgcaagtattgcagaccgcgaatgcgctgtttgatgcgttattgaatattcgctaaaggagaaggatgacatgcgtatcagtacccagatgatgtacgaacaaaatatgagcggcatcactaattctcaggccgaatggatgaagctgggcgagcagatgtctaccggtaagcgcgttaccaacccatctgacgatccgatcgccgcgtcgcaggcggtagtactctctcaggcgcaggcgcagaatagccagtacgccctggcgcgtacgtttgccacccaaaaagtgtcgctggaagaaagcgtactcagtcaggtgacgacggcgattcaaaccgcgcaggaaaaaatcgtctatgccggaaacggcacgttaagcgacgatgaccgcgcgtcgctggcgacggatttacagggcatccgcgatcagctgatgaacctggcaaacagcactgacggcaatggtcgctatatctttgccgggtataaaacggaagcggcgccattcgaccaggcgacaggtggttatcatggcggcgagaaaagtgttacccagcaggtggattccgctcgcacgatggtaattggccatacgggtgcgcaaatttttaatagcatcaccagcaatgcggtgccggaaccggatggctcggactccgaaaagaatctgtttgtcatgctcgatacggcaattgccgcactcaagaccccggtggaaggcaataacgtggaaaaagaaaaagccgctgccgccattgataaaaccaatcgcggcttaaaaaattcgcttaataacgtcctgaccgttcgtgcggaactgggaacgcaactgagcgaactcagtacgctggattcactgggaagcgaccgtgcgctgggacagaagctacagatgagcaacctggtagatgtggactggaactcggtcatctcctcctacgtcatgcaacaggcggcattacaggcgtcctataaaacgtttaccgacatgcagggaatgtcgcttttccagttgaaccggtaacacctctttttgaaacatatcacgaaactggatatgttttgtctgcccgcgccatccaccccggcgcgggcatttttttagtcgtcattgagttagtggtcatattgtcgcgcccgtagcgacgccatccgtacgtattatcccgcccgatctcataaacgcctggagtgactaaaagacgccatggggtgaggcattgccctgtaaggggcataaaaaagccgacctggcggtcggctttgtatcagcatttacatcattctaccggctgtgggcgtgtcgccggggcgctggcgtgacgtgtggcgctgtgtccgcctgccgcgcctttaccttcaaagtggaaggaaggccgctgccagtcgctatggtgcggggtttccggcacatattccggcgctggcgcacgcgtcatcggcgcgctggcgtgattatgatcgtcaacgcagacaacgtcctgcgacttttccaccacctgggccggtgcgataacggtttcttctgccgtgtgctccacaacagccgcttccgcttttgtctcttcttctggctcgacaacgacaacatcagctacgttttcagccaccgtaatggacgcgtcggcggtttctgctaccggttcggcgtcagcaataacctcttgcgccaccggcgtatcgctttcggcaatcagttgcggctgttcatcaactggcgcggcaatcacttccggatgcgttgtctcgacctcgacgacttccggcgcctgtggttcggcgacggtctgcggctcaacggcaacgttttctactgcctgtaccgacgcttgtggttcgagcgctgcggtcgcagcgataacctgctgttcagcgacaaccggttgtggcagcgccagatctgcttcacgctgctcgtcaacaacctgcgtttcctgaggacggacaatcgggtagcggatccagactttaccggacgccatttctggcgacgcgcaggcgacggttaacggcattggcgattgtgtcgggtagcgctcgtcacgatagcgacggcgacgctgaccgcttacgcgcaggtggcgcggagaacggcgggagcgacgcggcataccggtattatcgcgaggttctacgctatcatcctgctctggcgcgatatcggcgacgacaggtaaatcaactttcgccagctcggtacgcggcgctggaacgggctgttcaacgttttcaaccgggcgcggttcgtcgacgacgaccggcgtgtcaaccgtttcaaccactgcgctgttggtaaagcggactttctgattaagctggcgctgcttgcggcgcggctgaacctgctgaacgcgttcttcctgctcggtctcctggacaggttgttcttcgcggttaagcgcttttacttcctgctgcgcctggcgcttgtcatcattgcggcggcggctgcgttcgcgacgcggcgtctgttgctgttcatcgccggttttcactttttccgccgtttcctgctggcgggtatcgcgcgcttccgcattttgctgctgcgtctggcgacggttacgacgattatcgtcgcggctctcgccgccgtcacgtccggcacggttatcacgggtgtcgcggcgttcgttacgatcgcgacggttgttctgccgtggcttgcgacgatcctgctgacgctccgctttttcttccgctttcggcgcggctgtttcgacggttttcgtttcttcaccgctgaacagttgtttcagcgcgttaaggaagcggctaaacagacccggctgggcaggctgcgcggcggcaacattatcctttttcgccgtggcgacgctaaccgccggttcgacaggcgtcggcgccggaggcacatctggcatagcgaatgtcgccagcgcaggctgctccgggcgtttacgctcggcgtactcttcttcagaaggcagcgccatcgcttcttcgtgcagcttcggcagcatgtagctcagggtcggcgtttcttcccctttgcgtacgcgcagcacggaatagtgcggcgtttccatctgatcgttcgggacgatgacacagcggacgccatcctgacgcgtctcaatagcgttcactgccgtccgtttttcgttaagcagataagaggcgatcggcaccggaacaatggcatggacttcctgcgtattctctttcagcgcttcttcttcaatcaggcgcagaatggacagcgacagagattcgttatcgcgcacggtgccggtaccgctacagcgcggacacacgtgatggctggattcgcccagagacgggctcaggcgctgacgcgacatttcgagcaggccgaagcgggaaatatggctaatctgaatacgcgcccggtcctgacgcaccgcttcacgcagacggttttctaccgcgcgctggtgacgtaccggcgtcatatcgataaagtcgataacgatcaggccgcccaggtcgcgcagacgcaactggcgggcaatctcatcggccgcttccaggttggtattaaacgccgtttcttcgatatcgccgccgcgagtcgcgcgggcggagttgatatcgatggcggttaacgcttcggtactgtcaatgacgatggagccgccggagggcaggcgcacttcacgctggaacgctgactcgatctgcgattcgatctggtaatggctgaacaacgggatttcaccggtgtacagcttaattttgctgctaaaatccgggcggcccaacgcggcgatatgctgacgcgccatttccatcacttttggattgtcgatcaggatttcaccgatatcctgacgcagatagtcgcgaaacgcgcgtacgatgacgttgctttcctgatggatcaggaacggcgcgggacggctttcagcggctttctgaatggcctcccagtgtttcaggcggaagcttaaatcccactgcaacgcttcggcggatttacccacgcccgcggtacgcacgataagccccatcccttcaggaagttccaggctggccaacgcttcttttaactcggtacgatcgtcgccttcaatgcgacgggaaataccacccgcgcgcgggttattcggcatcagtaccaggtagctgcccgccagactgataaaggtggttaacgccgcgcctttgttgccgcgctcttctttatcgatttgaacaatgacttcctggccttcgcgtaacacgtctttaatgttcgggcgaccatgagcgctgtagttagcggggaaatattcgcgggcaatttcttttaacgggaggaaaccgtggcgttctgcgccgtaatcaacaaaagccgcttccaggctcggttcaatacgggtaattttgcctttatagatgttcgcttttttctgctcgtgtccggggctttctatatccagatcgtacagacgctgcccatctacaagggcgacgcgcaactcttcctgctgagtcgcgttgattaacattcttttcatcgtaacttactcattattcttacgttgacgactaagctgcgggcatggtgacgccttaccgggcatgaaccgatggcctcgtgactatttcgcgtcgccaacctcacggttatcgtcagctcaaagaggcgcagagtgtcggttgcctgtatttcatacggaaacacagcgcaattatcagggaagcagcctgggcattactctccagagaagatcctatctaccggtaaggactgcaacccgcagcccgctaactgtctgaaaaatcaatacgtcttacgccattgctgcgttgatgatcggtcagacaaaatgggttattccgctaaactttttgttttaacaagtttcggtgcggaaaccgcatcattattccactgctaaccttgttatagcaagatgacttttaccatttatcacccgcttactcacagttttttcaccagcgtgagccaatcgctttaataaccagcaaaaccgcagtgaaaaatgttcatccactggcgtagacgtctctataagcatagaaaaatgtgtggcgcgaatctcacaggctatttagaatctccccccatgaaaacagaaacgccatccgtaaaaattgttgctatcgccgctgacgaagcggggcaacgcattgataactttttgcgcacccaactgaaaggggtaccaaaaagtatgatttatcgcatcttgcgtaaaggcgaggtgcgggtgaacaaaaaacgcattaaaccggaatacaaactggaagcgggcgatgaagtccgcattccgccggttcgcgttgctgaacgcgaagaagaggccgtgtcgccgcatttgcaaaaagtggcggcgttggcggacgtcattttgtatgaagacgaccatattctggtgctgaataagccttccggcaccgccgtacacggcgggagcgggttaagttttggcgtcatcgaagggctgcgggcgttgcgtccggaagcgcgattcctggaactggtgcatcgtcttgaccgcgatacctccggcgtgctgttggtggcgaaaaaacgctccgcgctgcgttcgctgcatgagcaactgcgcgaaaagggaatgcagaaagattatctggcgctggtgcgcggccagtggcaatcgcacgttaaaaccgtacaggcgccattattaaagaacattctgcaaagtggcgaacgcattgttcgcgtgagccaggaaggcaaaccgtcagaaacgcgcttcaaggtggaagagcgctatgccttcgccacgctggtgcgctgtagcccggtcacgggccgtacgcatcagattcgcgtacatacccaatatgccggtcaccctattgcgttcgacgatcgctacggcgaccgtgagtttgatcaacagcttaccgaagcgggaaccggtcttaaacgtctctttctgcacgccgcggcgctgaagttcacgcatccgggaacgggcgaagtcatgcgcattgaagcgccaatggataacgccctgaagcgctgtctgcaggtgctgcgtaacgcaaaatagttcctctttcgggcaggttatctgcccgaatctcacttttctcataatatttttgttttgctgtatccgacgcatttttaccgttgtgcactgtttattcttgcgatccggatttcggcgcgtttaaggacgaacagatggccaatactagctggatgcgctcatttactcagcgttggggaaaatacgttatcgtgccgctcgtgatcgcgatgctgaccggttgcgaagggaagggcgatagttcacgacgggctttcgttgagtatttgaatacgcaaatcattacgtctcccgtggtgggcgtctgtgagttgacgccagcccaacgtcaggcttttggtcattacgccgatgactacgatgtactattaactgcctacgggcaaatctttgctgtggtgtatgagaccggccaggaggataagatcaccggtgttattcagtctgagcgtgataatctggttttcctgaacgagctacgtgtggctcgtgacgtaaacaatcgatttatccttcggttgaaaaatgtgagtagtgaaaacagaaaaaaatattctgctttaaagctccccgctgatgtgaagcctgtctttgacgctgcgtggaataaaaccgtaacaccgctggatgagacgatgactcgctattattttctgcgcggaaagcggctcgaccaactggtcgcaatgggcgagtttctgcaaaaacagggaaataaagtccgctttgaaacgaatggaaaagcggtttttgccgacctggcagcaaaagaacactttcaggatcaacaatttaattttttcattacgcagaatgatataaaccatcttactcagcagatggttgaatttataaatagtcaacaagatgcggctgatgctggcggcgttaattaaaggaatgtgtcgtgaggtgaagcaatgttcgggggagggcgtaaactcatcgcgagatggaatttaacgagtcgcaaagggaaggtttcaggacagtaaacgtcctgagagttgttcgcgagaataagtttgtaagccgcttttgacgccgtagagcgcgtcaggcgagtattgagaacatgtgtttttacaaaactgaactgagatggggaattcattaacgcgcacgtacaccgctgttgataccctatgggataaaacgcaccgtacatcggttcgtaataccaatgctttttttctggtcggtgaatggattgaccaggaaacgggcccgcacgaagagagtgaagatcggcaggcgctaaattgttcacaacaagcgctttccagttggttagaactggaagcggtcgaaactgctccccaataaacgggagataactaccaacacgtgcagaaacggcttttagcggtatttgaaaagcctacagagtaggccgtttattgctgtagcgggttgaagccctcccgtcgcagcatctggcacagggcaataagcggcaagccgatcagcgtgttcggatcacgaccctccaggcgctcaaataatgcaatgcctaaaccttcgcttttaaaacttcccgcgcagtgcagcggatgctctttacggacatagtcgtctatttccgcttcgcttaaatggcgaaaatgaacgtcaaaaggctccacttcggtttgtaagtgcccggaggcggagttatacagtgccagtccggtataaaacgtcacaatatttccgctggctttggctaattgctgacgcgctttttcttccgtcagcggtttgccggtgatttcgccgtccagaacacaaatttggtcggagccaataatcaaatgattcgggaaacgcgcggcgagcgattgcgccttcgcctgcgccagccgcagcaccaactgacgcggcgcttcgcccggcatgggggtttcatcaacatccggcgcggcgcattcgaaaggaatcgtcagcttttccagcagcgcgcgacgccagggagaggtagacgcaaggatgagacggggcatattttttccctcagatatagcgtaatgatgagagccatcttaaactatgctcttcggtcttcaagcctgtcatactgactcgtcttgagcgaaaataagtctgtaacccgcaatgtgtgcgaattattggcaaaaggcaaccgcaggctgcctttttctttgactatatgacgttacgaagttaatatgcgcgccctatgcaaaaggtaaaattacccctgactcttgatccggttcgtaccgctcaaaaacgccttgattaccagggtatctatacccccgatcaggttgagcgcgttgccgaatctgtagtcagtgtggacagtgatgtggaatgctccatgtcgttcgctatcgataaccagcgtctcgccgttttaaccggcgatgcggtcgttacggtgtcgctcgaatgccagcgttgcgggaaaccgtttacccatcaggttcacacaacgtattgttttagccctgtccgttccgacgagcaggctgaagcactgccggaagcgtatgagccgattgaggtaaacgaattcggcgaaatcgatctgctggcgacggttgaagatgaaatcatcctcgccttgccggtagttccggtgcatgattctgaacactgtgaagtgtccgaggcggacatggtctttggcgaactgcctgatgaagcgcaaaagccaaacccatttgccgtattagccagcttaaagcgtaagtaataggtcttccccgcggacgcagggataaaccgtaattgaggagtaaggtccatggccgtacaacagaataaaccaacccgttccaaacgtggcatgcgtcgttcccatgacgctctgaccgcagtcaccagcctgtctgtagacaaaacttctggtgaaaaacacctgcgtcaccacatcactgccgacggttactaccgcggccgtaaggtcatcgctaagtaatcgcgcgatactcgatgccttttgcatcacaggcgtgcctgtggtgtaaaagccgaagagtacaagcgtgataaagcttagtgaggatttctccgcgtaagcggagaacaccgaaccaggcagcgacgataccttgacacgtctaaccctggcgttagatgtcatggggggcgattttggtccttccgtgacggtgcctgcagcattgcaggcactgaacgctaattcgcagctcactcttcttttagtcgggaatcccgatattatcacgccattacttgccaaagctgactttgaacaacgttcgcgtctgcagattatccctgcacagtcagttattgccagtgatgcccggccttcgcaggcgatccgcgccagtcgtgggacatccatgcgtgtggccctggagcttgtgaaagaaggccgagccgaagcttgcgttagcgccggtaataccggggcgctgatggggctggcgaaattattgctcaagcctcttgaggggattgagcgtccggcgttggtgacggtattaccgcaccagcaaaagggcaaaacggtagtgcttgatttgggtgccaacgtcgactgtgacagtaccatgctggtgcagtttgccgtgatgggcgccgttttggcggaagaggtcgtcgggatcaaaaatccccgcgtggcgctactcaatatcggggaagaagaaaccaaaggcctcgacagtattcgcgaagcctctttaatgttaaaaacagtcccaaccatcaattacatcggctaccttgaggcgaatgagttactgacgggaaaaaccgatgtactggtgtgtgacggctttacaggcaatgtcacacttaaaacgatggagggggttgtcagaatgttcctttcactgctgaaatcacagggcgaggggaaaaaacggtcgtggtggctgctgttattaaaacgttggttacaaaaaagcctgacgaggcgattcagtcacctcaaccccgaccagtataatggcgcctgtctgttaggattgcgcggcacggtgataaaaagtcatggtgcggccaatcagcgagcatttgcagtcgcgattgaacaggcagtgcaggcggtgcagcgacaagttcctcagcgaattgccgctcgcctggaatctgtatacccagccggatttgaaccgctggacgatggcaaaggcgtaaacctgcgggcgcacagataatatcgttgtctccccggcgccgccagcgtgccagacgtttacaggtaacggtatataaccgaaaagtgactgagcgtacatgtatacgaagattattggtactggcagctatctgcccgaacaagtgcggactaacgccgatctggaaaaaatggttgagacctctgacgagtggattgtcactcgtacaggtattcgtaaacgccatatcgccgcgccgaatgaaactgtcgcgacgatgggctttaccgctgcgaatcgcgcgattgagatggcggggatcgataaagaccaaattggcttgattgtggtggctaccacatcagcaacgcatgcatttccaagcgcggcatgtcagattcaaagtatgctcggtattaaaggttgcccggcgtttgatgtcgcggcagcgtgcgcaggtttcacctacgcgttaagcatcgccgaccagtacgttaaatccggcgcggttaaacacgcgctggtggtcggttccgatgtattagcccgcacttgcgatcctggcgatcgcggtacgatcattattttcggcgatggcgcaggcgcggccgtactgagcgcttctgaagaaccgggtattatctccactcatcttcatgccgatggccgttacggtgaattactgaccctgccgaatgccgatcgcgtaaatccggataacccgatttacctgacaatggcgggcaatgaagtctttaaagtggcggtcactgaactggcgcatattgtcgatgagacgctggcggctaataacctggatcgctcagaactcgattggctggtgccgcatcaggctaacctgcgtatcattagcgcgacagcgaaaaaactcggcatgtcgatggacaatgtcgtcgtcacgctggacaggcacggcaatacctccgcggcttctgtgccgtgcgcgctggatgaagccgtgcgtgacgggcgaattaaagccggtcagctggtattgcttgaagccttcgggggtggattcacctggggctccgcgctgattcgtttctagtataaggatttaaacatgacgcaatttgcatttgtgttccccggtcagggttctcagagcgttgggatgttggccgagatggcggcaaattaccctatcgtagaagaaacgtttgctgaagcttctgcggctctgggatatgatctgtgggcgctcacccagcaaggtccagcggaagaactgaataaaacctggcagacgcagccggcgttattaaccgcttccgtcgcgctttggcgcgtttggcagcagcagggcggtaaaatgcctgcgttaatggcaggtcacagcctgggcgaatattccgcgctggtttgcgctggcgtcatcaactttgctgatgccgttcgtctggtggaaatgcgcggtaaattcatgcaggaagcggttccggaaggcactggcggcatgtctgcgatcatcgggctggatgatgcctctattgctaaagcctgtgaagaatctgccgaagggcaggttgtttcgccggttaactttaactcgccgggacaggtggttatcgccgggcataaagaggcggtagaacgtgcgggcgcagcctgtaaagccgctggcgcgaaacgcgcgctgccgctgccggtgagcgtaccgtcgcactgcgcgctgatgaaaccagcggcagataagctggcggttgaattagccaaaattacctttagcgcgccaacggtgccggtagtgaacaacgttgacgtgaaatgtgaaaccgatgccgccgctatccgcgatgcgctggttcgccagttgtacaatccggtacagtggacgaagagcgtggaatttatcgcggcgcagggcgttgaacatctttatgaagtgggtccaggtaaagtcctcactggtctgacgaaacgtattgtcgacaccctgacagcgtcggcgctgaacgagccggcggcgctgtctgcggcacttacgcaataaaagaggaaaaccatgagctttgaaggaaagattgcgctggtgactggtgcaagccgtggcataggccgcgcaattgcagagactctcgttgcccgcggcgcgaaagttatcgggactgcgaccagtgaaaatggtgcgaagaacattagcgactatttaggtgctaacgggaaaggtttgatgttgaatgtgaccgatcctgcatctattgaatctgttctggaaaatattcgcgcagaatttggtgaagtggatatcctggttaataatgccggtatcactcgtgataatctgttgatgcgaatgaaagatgatgagtggaacgatattatcgaaaccaacttatcatccgttttccgcctgtcaaaagcggtaatgcgcgctatgatgaaaaagcgttgtggtcgcattatcactattggttctgtggttggtaccatgggaaatgcaggtcaggcaaactacgctgcggcgaaagcgggcctgatcggtttcagtaaatcactggcgcgtgaagttgcgtcccgtggtattactgtcaatgttgtggctccgggttttattgaaacggacatgacgcgtgcgctgtctgacgatcagcgtgcgggtatcctggcgcaggtgcctgcgggtcgcctcggcggcgctcaggaaatcgccagtgcggttgcatttttagcctctgacgaagcgagttacatcactggtgagactctgcacgtcaacggcggaatgtacatggtttaatcacgattgaaaaatatttgcgttattagggcgaaaggccgcaaaataacgtaaaatcgtggtaagacctgccgggatttagttgcaaatttttcaacattttatacactacgaaaaccatcgcgaaagcgagttttgataggaaatttaagagtatgagcactatcgaagaacgcgttaagaaaattatcggcgaacagctgggcgttaagcaggaagaagtaaccaacaatgcttctttcgttgaagacctgggcgcagattctcttgacaccgttgagctggtaatggctctggaagaagagtttgatactgagattccggacgaagaagctgagaaaatcaccaccgttcaggctgccattgattacatcaacggccaccaggcgtaagtgaacatctccaggcggtcgttcgaccgcctgagttttatctttttgtcccactagaatcattttccctccctggaggacaaccgtgtctaagcgtcgtgtagttgtgaccggactgggcatgttgtctcctgtcggcaataccgtagagtctacctggaaagctctccttgccggtcagagtggcatcagcctgatcgaccatttcgatactagcgcctatgcaacgaaatttgctggcttagtaaaggattttaactgtgatgacattatctcgcgcaaagaacagcgcaagatggatgccttcattcaatatggaattgtcgctggcgtacaggccatgcaggattctggccttgaagtgacggaagagaacgcaagccgtattggcgccgctatcggctccggtatcggtggtctcggtctgatcgaagaaaaccacagttcgctggtaaaaggcggaccgcgtaagattagcccgttctttgtcccgtcgacgattgttaacatggtagcaggccatctgactatcatgtatggcctgcgtgggccaagcatctctattgcgactgcctgtacttcaggcgtgcataacatcggccatgccgcgcgtatcatcgcctatggcgatgcggacgcgatggtggcaggtggcgcagaaaaagccagtacgccgctgggtgtaggtggttttggcgcagcgcgcgcgctgtcgacccgcaacgataacccacaggcggcgagccgtccgtgggataaagaacgcgatggttttgtactgggcgacggtgccggtatgttggtgcttgaagagtacgaacatgcaaaagcgcgtggtgcgaaaatctatgccgaaatcgtcggctttggtatgagcagcgatgcttaccatatgacgtcgccgccggaaaatggcgcaggcgctgcgctggcgatggttaacgcgttgcgtgatgccgcgattgagcctgctcagattggctacgtcaacgcgcacggcacgtcgacgcctgccggcgacaaagctgagacgcaggcggttaagtcagtctttggcgatgctgcaagccgagtgatggtgagctcgaccaaatcgatgaccggccatctgttgggcgccgcaggcgcagtagagtctattttctctattctggcgctgcgcgatcaggccattccgccaaccattaatctggataacccggatgaaggttgcgatctggacttcgtgccgcatgaagcgcgccaggtcagcgatctggagtacgctctgtgcaactcctttggttttggcggaactaacggttccttgatctttaaaaagatctaagttaagccagagacagacattaataaaaaggtccgcttgtcgggccttttttatcaggcatatcacctcttgttctgcgttattcatcctgccacactaacaggcgacggataaggagccactatgtttttaattaatggccatgcgcaggatcaacttgctgtaagcgaccgggcgacgcagttcggcgatggcagttttacgaccgcacgtattgttgatggcaacatttgccatctggaagcgcatcttcagcgcttgcaggttgcctgtgaaaaattacggatcgcttttagccattggtcgacccttcggcaagagatgacaatgttggccacagggcatgattcaggcgtgttgaaagtgatcattagccgtggtagcggcggccggggatacagcgccatgaattgtcaggcagctacccgaatcctctccgtttctgcttatcccgcttattattctcagtggcgtaagcaaggcatcactcttacccttagtcccataccgcttgggcgcaatccttatcttgccggattaaaacatctgaaccgcctcgaacaggtgttgattcgctctcatcttgagcagacggacgccgatgaggcgctggttcttgacagcgagggatgggttacggaatgctgtgcggctaatttgttctggcgtacaggcgacattgtttttacgccgcgtctggatcaggccggggtgaacggcattatgcgacaattttgtttacgccaactggcgcaatctcctttccaggttcttgaagtacaggcgagagaggaggcagtcaggcaggcggatgagattatcatctgcaacgcgctaatgccgattattcccatacgcgcctatcacgggacgtcgtattcttcgcgaacactgtttcaatttttagccccattttgtgagcatccgaattagttatgaaaaaattgtcaggcgttttccttctgctgttggttgtgctgggtattgccgtgggcgtggggatgtggaaagttcgccatctggcgaacagcacgttacttattaaagacgagactatctttacgctcaaggcgggaacggggcggctggcgcttggtgaccagctttatgatgaaaaaatcattaatcgcccccgggtatttcagtggctgctgcgcgtggagcctgagttatcacactttaaagcgggaacttaccgttttacgacggggatgaccgtacgggagatgcttgagttgctggagagcggcaaagaagcgcaattcccgttgcggtttgtggaagggatgcgccttagcgactacctgaaacagctacgagaggcgccgtatattcgccatacattgccggatgatgactacgccactgtcgctcaggcattaaagcttgcgcacccggaatgggtagaagggtggttctggcctgatacctggatgtataccgccaacaccagcgatgtcgctattctcaagcgagcgcatcaaaagatggtgaaagctgtcgatactgtctggaaaggtcgggccgaggggctgccttataaagatcagaaccaactggtgacaatggcctcgattattgaaaaagagacggctgtcgccagcgaacgcgatcaggtggcctcagtctttattaatcgcctgagaatcggtatgcgccttcagaccgatcccaccgtgatttacgggatggggacgagttataatggtaacttgtcgcgtgcggatctggaaaagccgacggcttataacacgtataccataaccgggctgccgccaggaccgattgcatcgcccagcgaagcgtcattgcaggcggcggcgcatccggcgaaaacgccgtatctctattttgtggccgacggtaaaggcggtcacacatttaacaccaatcttgccagccataatcggtcagtgcaggagtacctgaaagtgcttaaggaaaaaaatgggcagtaattatatcgtcatcgagggcctggaaggcgccggaaaaaccactgcgcgcgacgtggtggtggagacccttgagcaactgggtattcgtaatatgatttttacccgtgagccgggcggtacgcagcttgccgaaaaactaagaagtctggtgctggatattcgatcggtaggcgacgaagtgattaccgataaagcggaagtgctgatgttttatgccgctcgcgtacagctcgtcgaaacggtaatcaaacccgcgctggcgcaaggcgtatgggtgatcggcgatcgccacgatctctcgacccaggcgtatcaggggggagggcgcggcattgatcaaaccatgctggcgacactacgcgatgccgtgctgggcgattttcgtcctgacctgacgctgtatctggatgtcacgccggaagtcgggctaaaacgcgccagagcgcgcggcgatttggatcgcattgagcaggaatcttttgatttctttaaccggactcgcgcgcgctatctggaactggcggcgcaagactcgcgtatccgcaccattgacgcgacccagccgctggatgccgtcatgcgcgacattcgcgccacggtgacgaagtgggtgcaggagcaagcggcatgaaatggtatccatggttacggcccgcctatgaaaaactggtagaaagttaccaggcgggacgtgggcaccatgcgctactgattcaggccttacctggcatgggcgacgaggcgctgtgctatgcgctgagccgttatctgttatgccagcagcctgagggccacaaaagctgtgggcattgccgtggctgtcagcttatgcaggctggcacgcatccggactattacacgctgacgccggataaaggcaaaagcagcctcggcgtagatgcggtacgcgaggtcagcgagaaattgtacgagcactcccgtctgggcggcgcgaaggtggtgtggattgcggatgcggcgctattaaccgacgccgccgccaatgcgttgctcaaaacgctggaagagccgccggagcaaacctggtttttccttgccagcccggagcctgctcgtctgttggcgacattacgcagccgctgccggctgcatcatctggcgccgccgtccgaatcgtatgcgatgtcatggctgtcgcgagaagtgacggcgtcacaagaagcattgctcacggcgctacgtctgaatgcggggtcgcccggcgccgcgctggcgctgttgcagtctgaacgctgggcgcagcgtgaggcgctgtgtcaggcgttaatggacagtttgcatacgggcgactggtatgcggtattaacggcgctcaatcatgagcaagccccggcgcgcctgcactggctggcgacgctgctggtagacgcgctgaaacgtcagcacggcgcgtcgtacctgacaaacgttgatgcggacgcggttgttgccgcgctggcggggccgctatccccggcgcgtattcaggcaatcctgaacgatgtttgccattgtcgtgatcaattacttcatgtgaccggattaaaccgcgaactggtattaaccgatctcattctccgcatcgagcattacctgcaaccaggcaccttgttgcctgttcctcatctttgagagagacattatgtttttagtcgactcacactgccatcttgatggtctggattatcaatctttgcataaggacgtggacgatgtgctggcgaaagccgccgcgcgcgatgtgaagttctgtttagcggtggcgacgacgctgccggggtatcgccatatgcgcaagctggtgggcaagcgcgataatgtggtcttttcctgcggcgtgcatccgttaaatcaggatgaagcatatgacgtagaagaactgcgcctccttgctgcagaagacgatgtggtggcgatgggcgagaccgggcttgattacttttacacgcctgagaccaaaatccgccagcaggcgtcttttattcatcatatccagattggccgcgaattgcataaaccggtgattgtccatactcgcgacgcgcgtgccgatacgctggctatcctgcgcgaagaaaaagtgacggattgcggcggcgtactacactgttttacagaagacagagaaacggccggcaaattgttggatctggggttttatatctctttttccggcatcgtaacgttccgtaacgctgaacagttgcgtgatgcggcgcgctatgtgccgctggatcgattattagtcgagaccgattctccttatctggcaccggtgccgcatcgcggtaaagagaaccagcctgcgatggtacgcgacgtcgcagaatatatggcggtattgaaaggggttgccgttgaagaactggcgcagatcaccaccgataactttgctcgcctgttccatattgacgcgtctcgcctgtcatcaatccgttaaacgagtttttttaaagctcgtaattaataaacaaaacgcgtaaagttcaccgccacaaaaggggcggtgagcgagcttatggaaacattcggaaactcattttggcagaatgtgatactttttaggctatctggcgctgaaacgtgatagccgtcaaacaaaatcagacgtatttattttactctgtgtaataaataaaagggcacttagatgtcctgtccacggcggggttctcccccctcgccaatgcgtgagaacgtagaaaagcacaaatactcaggagcactctcaattatgtttaagaatgcatttgctaacctgcaaaaggtcggtaaatcgctgatgctgccggtatccgtactccctatcgcaggtatcctgctgggtgtcggttccgctaacttcagctggctgccagccgttgtatcgcacgttatggcagaagcgggcggatctgtttttgccaatatgccgctgattttcgctatcggcgtggcgttgggcttcaccaacaacgacggcgtttcggctctggcggcggtagtcgcgtatggcatcatggtgaaaaccatggctgtggttgcgccgctggttctgcatttacctgctgaagagatcgccgctaaacaccttgctgatacgggtgttctcggggggattatctccggtgcaatcgcagcgtatatgtttaaccgcttctaccgtatcaaactgcctgagtatctgggcttctttgcgggcaaacgcttcgtgccgatcatttcgggtctggccgctatttttaccggtgtggtgctgtctttcgtatggccgccaatcggtacggctatccaggcgttctcgcagtgggcggcttatcagaacccggttgtcgcgtttggtatttacggttttatcgagcgttgcctggtgccgtttggtctgcatcatatctggaacgttcctttccagatgcagatcggcgaatataccaacgcagcgggtcaggtattccacggcgacattccgcgctatatggcgggcgacccgacggcaggtatgttgtctggcggcttcctgttcaaaatgtacggtctgccggctgcggccattgctatctggcactctgctaaaccggaaaaccgcgcaaaagtgggcggtatcatgatttccgccgcgctgacctcgtttttgacgggtattaccgagcctatcgagttctccttcatgttcgtggcgccgatcctgtacattattcacgcgattctggcaggtctggcattcccgatctgtatcctgctggggatgcgtgacggtacgtcgttctcccacggtctgatcgactttatcgtgctgtccggtaacagcagcaaattgtggctgttcccgattgttggcgccggttatgcgattgtgtactacaccgtgttccgcgtgctgatcaaagcgttggatctgaaaacgccgggtcgtgaagacactactgatgacgcaaaagcgggggcgaccagcgaaatggcgccggctttggttgcggcgtttggcggtaaagagaacatcactaacctggatgcctgtatcacgcgtctgcgcgtgagcgtagccgatgtagcgaaagtggatcaggctggcctgaagaaactgggcgcggcaggcgttgtcgtcgcgggttccggcgttcaggctattttcggtacgaaatccgataacctgaaaacggaaatggatgagtacatccgtaacagctaagcagtaatgatgttggggagaattaaggcagccattcggctgccttttttaatggcgctttacatgccgctctccgacagtctgtcagaactgataattggcggtgaggctgacgttacgcggtgcgccgtaaacaatggaaccatcaatattggtgtcgtaggttttatcaaacaggttgttgatgtttccctgtacggagaaatttttcgtcacctgatagcgggtaaacagatcgaccagcgcatagctgccctgttcggcgcggaaagtgccgtacggcgtcgtggtatctttgtaaacccgattctgccagttcacgccgccgccgaccgtcagctccggtatcgccggcagacgatagcgggtgaataacttcacgctggtgcgcggaagattagggttcacggcgttaccttcattgtcctcggcaacataccgggtagccccgaaagtcatctgccagttatcggtaattgcgccgttcacttcaaattcgacgcctttgctcaccgttccgtcagtagacttccaggcaaactccccattactgccagggatgggaatagtggttgcctgagcgacgttattctgctcaatgcggaacacggacaacgtggtggtgaggcgactgttcatccagtcggacttcagacccgcttcatagttattaccggtaatcggagccagatattgacccgctttgtcgcgtttattctgcggctgaaagatagaggtataactggcataagcggaccagttgtcgttgatatcataaatcagcccggcatacggcgtggtatggtttttctccatgctgtaggtcagtgtatcaacacgccagttggtataacgagcgccgagaatcagatgcagcgggtcggccagcgaaatgcgcgtagcggcatacagcgatttcatatgcgtggtatcgtcctgcgccagattttgtggcgcccagtgggtttgggggaaattaccgttaaaggcgctgaagttgccaatgtcgtccggaaagacgttcgcccaggcgctaaaatagcggttattctgtttactataactgccgccaaacatcatattgtgctgacggccaaacagctcataagcgccatcggcaaagagatctatggcatctactttgcgcttgccgctgttccagcccgtaccgccgaccacggggtagcttgcgccataaggactcaccagcgtacctgtctctttatcgactaacgtatcgatatacatcattttactgtcgaatttgacctcagtatgggtcgcattcagggtcgcctgccagctttcggcaaaacgctgtttaagcgtgacgaagaatttatttatctctttgttgttataagcccagtccggggcggtactacgcgcgcggtcatagctatttttgctgccatcggtgttccagcgcggcagaccgccccaggttgggctgttgacatcaattttttgatattcataaccggctgaaaggttggtggttgtacccagatcggcatcgacaattccggaaaagaacgctttctcactgttatagcggtccagccaggaatcattattctgataacccgccacgatgcgcccacggacattaccgtctgcggtgagcggactttgcagatccatgacgtaacgctgcttattccagctaccgtattctgtggagacgttacctttgaactcccgactggtggcgtgtttacggatcatattaattgaggcagaaggattaccggtcccggtcatcagcccattcgcgccgcgaaccacctccacgcgctcatacagcgcggtatccgttagcgcatcgcccagattccagcgggactcaaaatacgttggaataccgtcaaccatatagttgtcaatttcaaacccgcgcgagtaatagctgatgcgatcggattcagcctgacttccgctgatccccagcgtattggtcatcacctcgcccagggtttgcaactgctggtcttccatacgctgctggctgacaatactgaccgactgcgggatatcgcgctgagtcatcggcattttggtgcccgctgcggtcgttttcatgctgtaatcctgttcttcacggtttacggcgtcagcggtcgtctcgccttcgacaataacggtatcctcagccgcgaaggcggcaggcataaatgccatcgccatacccatagctaacagcgacggtgcggcggtggacggaaggtgtttgtcccggcggtattgaatgaaagacatctgaaaatccttgcttgttattggggtaagttcaggacgtatgacgttgaaccttttcattctttgctagttaatgcgcataaaaatgcaaatgagaaatatacgcatttgtattaaatgtgtaaaacggtataaccagggaaactagaaatattttttaagcgtacaaaggcgtcatggctgggggatatggcggtaagtccagcatgtagtcatttttcgcttaataaatcgtgggttaaagttgaaagagcgtcggtaactcgctcatactctatactcgcagtatggctcggcgtagcatgtgcgctgcaagggctattatgaaaaaggaaaacgtcgtggcagaagaaactatattcagcaaaattattcgtcgtgaaatcccttcggatatcgtttatcaggatgagctggtcaccgcctttcgtgatatttcaccgcaggcgccgacgcatatcttgattattcccaatatcctgatcccaaccgtcaatgacgtgacggcggaacatgaacaggcgttaggtcggatgatcaccgtggcggcgaaaatcgccgaacaggaaggcattgccgaagatgggtatcgtttaatcatgaataccaaccgtcatgggggccaggaggtttatcatatccatatgcacctactgggcggccgcccgctaggcccgatgctggcgcataaaggcttgtaagtatgatcaaaggatgcatcgcggtttctctgggcttgctgctgcttaccggctgccggtcacaccctgaaattccggtaagcgacgcgcagtcgctggtgatggagtccacggttctggcggcgggcgtcaccgcagagccgcctgaactgacggcgtctgatatccagccatcagcctcttcccgcgtctataacgaaaggcaagagcccataaccgttcattatcggttttactggtatgacgcgcgggggctggagatgcatccgctggaggcgccgcgtagcgtaaccatacccgcgcgttcgtcggtaacgctatttggcagcgccaattatctgggggcgcataaggtcaggctttatctttatttgtgaggagtgaattttgatgacaaaaatgcatcgctacgctgccattgctgcgctggcgatatttctctccgggtgtatggcgcaacgtcaacctgcgccagttgaagaggtaaaaccagcgccagaacaacccgcgcagccgccgcagcctcctgttgtgccgtctgtgccaacgattccacagcaaccggggccgatcgaacatgaagatcaaacgggccagccagcgcctaaggtgcgccactatgactggaacggcgcgatgcaaccgctggtcagcaaaatgttgcaggctgatggcgtgacggccggaagcgtattgcttgttgacagcgtgaataaccggacgaatgggtcgttaaatgcgaacgaggcaacggaaacgttacgtaatgcgctggcgaacaacggtaaatttacgctggtgtccgtacagcaactctcgatggcaaaacagcagttaggattgtctccgcaggatagtctgggaacgcgcagtaaagctattggcattgcgcgcaatgtcggggcgcaatatgtactttactccagcgcatccggtaacgttaacgcgcctgcattacagatgcagttaatgctggtgcaaactggcgagataatctggtcaggtaaaggtgcggtccaacaacaataatcccttaacgcgcgacgagatcctgtcgcgctattttccccagtatcgtcccgccgtcgccacatcgcaggggctaagcggcgggagctgtattattgcccacgatactcaccgtgtcgtgctgcgccgtcatcacgaccctgacgctccaccagcccattttttacgtcattaccgcgccttatcccaattgccggccagtcttgcgccgcgagcgcttttttatactccaggctggatggcggtagaatatctgcatggtgtggtaaattccgctctgccagatgccgacgaactggcggccttactgtatcatttgcatcaacagccgcgttttggctggcgtatcgcgctatcgccactattggcgcagtactggtcgtgttgcgatccggcaaggcgtacgccgttttggttgcggcggctcaaacagttgcaaaaaaacggtgaacctcgcccgcttcggctcgcgcctttgcatatggatgtccatggcgacaatatagtattaacgtccgccgggttgagactgattgactgggagtatgccggcgacggcgatattgcgttggagctggcggcagtatgggttgaggatgaacgccagcaccgacaactggcagacgcttatgccgcgcgcgcgcgaatcgacgcccggcagctatggcgacagatacgattatggcacccctgggtcattatgctaaaagcagggtggttcgaataccgctggcgacaaaccggcgagcaacaatttatcaggctggccgatgaaacctggcgccagctacgtatgaaaggataaggagagcagtgtgggcccagtaatgttgaatgtcgaaggatgtgagctggatgcggaggagcgcgagatactggcgcatccgctggttggcgggcttattctgttcacgcgtaattaccatgacccggaacagttgcgcgaattagtgcgccagattcgggcggcatcgcgtaaccatctggtggtggccgtcgatcaggaaggcgggcgcgtacagcgtttccgtgaagggtttacccgcctgcccgcggcgcaatctttttttgcgctgcatgggctggaagagggggggcgactggcgcaggaggcagggtggctgatggccagcgaaatgatcgcgatggatattgatatcagttttgcgccagtgctggatgtcgggcatatcagcgcggcaattggcgagcgttcttatcatgccgatccagcaaaagcgttggcaatggcaacgcgctttattgacggcatgcatgacgccgggatgaaaacgaccggtaagcatttccccggccacggcgcggtcacggcggactcccacaaagagacgccgtgcgatccacgtcctgaaacggacatccgtggcaaagatatgtcggtgttccgcacgctgattagcgagaataaactggatgcgattatgcctgcccacgtgatctaccgcgctatcgatccgcgtccggcaagcggttcgccgtactggctgaaaacggtgctgcgtcaggagttaggctttgatggcgtcattttctccgacgatctgtcgatggagggcgcggcgattatgggcagctatgctgagcgcgctcaggcgtcgctggatgcgggttgcgatatgattctggtctgcaataatcgtaaaggcgcagtcagcgtgctggataatctgtcgccgatcaaagcagaacgtgttacacgtttgtatcataaaggttcattttcacgccgggagctcatggactcagcacgctggaaaacagccagcgcccagctcaaccagttacatgaacgctggcaggaagaaaaagcaggtcattaactcgagttttcgtgagggtgccagatgattatttatttacacggttttgattcaaatagtccgggcaaccatgaaaaagtgttgcaattacagtttatcgacccggatgttcggctggtaagctacagtacgcggcatcctaagcacgatatgcagcatctgctgaaagaagtggacaaaatgttgcagttgaatgtggacgagcgccctttaatctgtggcgtggggctgggcggttactgggcggagcggattggctttttgtgcgatatccgtcaggtggtttttaacccgaacctgttcccctatgaaaacatggaggggaaaatcgatcgcccggaagaatatgcggacatcgctacaaagtgcgtgaccaactttcgcgaaaaaaatcgcgatcgttgtctggtgatcctctcgcgtcatgacgaagcgctggacagccaacgctcagcgcaagcgcttcacccgttttatgaaattgtgtgggatgaggaacagactcacaaattcaaaaatatttcgccgcatttgcaacgtatcaaagcgtttaaaacgctgggataacgccatccggcaatatggcgttatcagtgaccggataaccagccttgcggctggtttttttatgctcaattctcgcaaactgtctatcttttcagcatgaaaacttgatgcacatcaattttggtatgaccaatgcaccgttcatgctattctcatatcagaagcttattctcattaacgtaacttgttgttaattaaaggctatgctaataacttttaattaacaattggttaataaatttaagggggtcacgttgactacaccattaaaaaagatcgtgattgtcggcggcggcgctggcgggctggaaatggcgacgcagttaggccataaactggggcgcaagaaaaaagcgaaaatcacgctggtagacagaaatcacagccatctgtggaaaccattgctgcacgaagtggcgactggctctctggacgaaggcgtggatgcgctgagctatctggctcatgcgcgtaatcatggtttccagttccagctggggtcggtgatggatatcgatcgcgaagcgaaaaccatcaccattgccgagttgcgtgatgaaaagggcgaactgctggtgccggagcgcaaaatcgcgtatgacacgctggtgatggcgctgggcagcacctctaatgatttcaacacgccgggcgtgaaagagcactgtatcttcctcgataacccgcatcaggcgcgccgttttcaccaggagatgctgaacctgttcctcaagtattcggctaatctgggcgcgaacggtaaggtcaatatcgccatcgttggcggcggtgcgacgggggttgagctgtcggctgaactgcataatgcggtaaaacagctgcatagctatggttataaggggctgaccaacgacgcgctgaacgtgacgttggttgaggctggcgagcgtattctgcctgcgttgccgccgcgtatctccagcgccgcgcataatgaactgaccaaactgggcgttcgcgtgctgacgcaaactatggtcaccagcgccgacgaaggcggtctgcatacgaaagaaggtgaatatattcaggccgatctgatggtgtgggcggcgggtatcaaagcgccagattttatgaaagagattggtggtctggaaacgaaccgcattaaccaactggtggtggaaccgacgctgcaaaccacgcgcgatcctgatatttatgcgattggcgactgcgcttcctgcgcacgtccggagggaggttttgtgccgcctcgcgctcaggcggcgcatcagatggctacctgcgcgatgaataacattctggcgcagatgaatggcaaaccgctgaaagcttaccagtataaagatcatggatcgctggtctctctgtccaacttctctaccgtgggtagtctgatggggaacctgacccgcggttcaatgatgattgaaggacgtatcgcccgcttcgtgtatatctcgctataccgtatgcaccagatagcgctgcatggatactttaaaaccggcctgatgatgctggtgggcagtattaaccgcgtcattcgtccgcgcctgaaactgcattaatttctctgcgtctcaccggctgctcgcgccggtgagcgcttctccatcactcgcttcggagttgtccgaatccttcagctttaccgcctcatcccgcatttttcatcctcattccgattggctttgttcgcatactggttgcaaaattgttaccaatagcaacgaaggaggaactcccgtgaataaatcaatgttggcgggtatagggattggcgtagcggctgcgctgggtgtggcggcagtggccagtctcaacgtatttgatcgtggtccgcaatatgcgcaggtgatatcggctaaaccgattaaagagacggtaaaaacgccgcgtcaggagtgccgtaatgtcacggtcacgcatcgcagaccggttcaggacgaaaaccgtattgccggctcggtgcttggcgcagtagcaggcggcgtgattggacatcaatttggcggcggtcgtggtaaagatgtggcgacggtcgtcggggcgctgggcggcggttatgctggcaatcaaatccagggatcaatgcaagaaagtgatacttacactaccacgcagcaacgctgtaagacggtgtatgacaaatctgaaaagatgcttggctacgacgtgacctacaaaattggcgatcagcagggcaaaatccgcatggataaagaccccggaacgcaaattcccctcgacggcaatggccaactggttctgaataacaaagcataaaaaagctgtactctgcaagttagcccctcattcgctcaggctgaggggcttttttttatccgaagccgcgtcgttcaggacttgatcagttcaggccagatgcgcagagtcgtacgcgtaatttgcatcagttgttcgaaggtggcaccttcacgggcgctgatcgacattccctgtaaaatacagtttatatattctgcgagcgcctgcgggttacagtgcgccggaatttcaccgcgctcctgacgttggcgcagaaactggatgagcgtctgttcctgcatggcgtggcgtgattttaccgtgcgggcgatatcgcgcgaggaggcggccagggtggcggacgtattaatcataaagcagccagccggcgtgtctgtactggtaaagcaggcggcaatttctgtgaagtaatcttccagcgccgattctacgcttttctcttcacaaaagagctgggcttcgtgttttgaggcaaagcgagtgatgtagcgatccaggacagcgcgaaataatccttttttgttagtgaattccgcatagagagtaggcgctttcgccccggtagcctctacgagatcggcaagcgaagttgcttcatagccgtgctgccagaagagagtcatggccttatcaagcgcggcttccctgtcgaacacttttggtcggccacggcttttcttcgcgcaactcgtggtatccgttgtcatgatgccgttgtacctgtttaaagagcggtctctctattataaaaacaaaccacttctggctccagagtattcattagaaaaataaatcaattctattcacatgaaaaataacatctttataaattatataacgatcattataaaaagaggttgacgtgtgatgtagatcacatctatgattaacttatcgatcgttaagttaatgcttacgacacccattcatctgctaaaggtcatcactatgaaaaacgtaaaaaccctcatcgctgctgccgtactgagttcgctctcattcgccagcttcgccgccgttgaagttcaggcaacgccagaaggtcaacagaagttcggcaccatttccgcgaatggcggcacgaatctgggctcgctggaagatcagctggcgcaaaaagcgcaggagatgggggcgaagtctttccgtattacctctgttaccggcccgaataccctccacggtacggcggtaatctataagtaagcattaaccctcattaatgccgctgcgattgccacaataaaaagaaaaagcctcgcgatgcatcgcgaggcttttttgtcggtcagctattcacgcttacagcgactgcggtttcgcctctgcttgacgggttacatccaccggcattccggaacgcacttccataacatgttccatcaccgcagcatcggtctgcggcgcgtccttaaaggcctgcatcgggccattcagcacaatcggcaacacctgcggatcgtcgcctatatttttagacagcggctgatgaacttccaccagtcgcacgccgcctggctccaccgaggctttaatcggcgtattgataatattcactttggttcccggcgtgacctgacggaacaatgtctctatatcaccgtcgcgcagacggatacagccggaactgacgcgcataccaatgccaaaatcggcattcgtgccatgtaacagatagacgccgccgtaggccgctaaacgaatcgcgtgatgtcccattgggttatcgggaccggcaggcaccacggcggggagatcgataccttgcgctttataacgggcgcgaatattggcggtcggcgtccaggttggattggcgcgtttatccgaaatggtcgtcaccatcgttggcgtcagggtatcgccgcccagttggccaatcccgatagggtagaccgtgaccgtatttttccccggttgataatagtaaagccgtaattccgcgaggttaatgacgataccttcacgtggcgcgtccggtagcagcgtttgcagcggaatcgttagcacgctgcctgcgcgtggcacataaggatcaatgccggggttggcctgtaacagggctaaaaagcccacgttatattttttggcgatcgcctccagcgagccgccgtcgtcttcaacgacatggaatttattttctcccaccagtcgactgccgggggcggaagaggccacgtattcgcctgcgcgggaagggcaagcatgatggtcgcggtaagcgcaagcaacgcccaccagcgagagagtcgcgtattgttgaacattataataaacccatgattattatgtggttatttttataaaagaggaaataagaattatggcggttggctgtgtctggaactgcagggaagtgcaaagaatttgtaaagattaggccggacgcagagtaatgacgcccggcctgacgcttatgcaatagcgttttcttccagttgctgcataaactggcgtacccagtctatacgcgttttacgttcgcttaaatcctgaataaacttgaggcgcgtcgggccatccagacggaaatgctgcggctgtttttgcagcaacccgataagccaggcggggtcaacgtggtttttctcggcgaactcaatcgttccgcctttctcgttaccctccagttttcggatgccgagcttttgcgcctgttggcgcaggcgggcgatatccagcagattacgcgccggatcgggcagcaggccgaagcggtcgatcaattccactttgatctcctccagctcgttttcgttcttcgcgctggcaatgcgtttatagaatgacagccgggtattaacatccggaataaaatcatccggcagtaacgacggcattcgcagctcgacttccgtttgctgactggtgagatcttccagcgagggttcgcggcctgctttcagcgcatcaacggcgttttccagcaattccatgtagagtgagaagccgatggtttccattgagccgctttgctcttcgccaagcagttcgcccgcgccgcggatctccagatcgtgggtcgccagcgcaaacccggcgcctaaatcctccagcgacgcaatcgcctccagccgtttttgcgcatcggtggtcatggccttaggatgtggcgtcaacagccaggcgtaggcctggtggtgcgagcgcccaacgcggccacgcagctggtgcaactgcgcgaggccgaaatgatccgcgcgttcaatgatgatcgtgttagcggtgggaatgtcgatccccgtttcgataatggtagtacacaccagcacgttaaaacgttgatggtggaaatcgttcatgacccgttccagctcacgttcgcgcatctgcccgtggcctatagcgattcgcgcttccggcaccagttccgccagccgctctgcggctttctgaatattttcgacgtcattgtacaaatagtaaacctgaccgccgcgcaggatttcacgcagaatcgcttcccttaccaccaggctatcatactcgcggacaaaggtttttaccgccagacgacgggcagggggggtggcgataatggagagatcgcgcataccgctcatcgccatattcagcgtccgcgggatcggcgtcgccgtgagcgtcagaatatcgacatcggcgcgcatcgccttaattcgctctttgtggcgcacgccgaaacgatgctcttcatcgacaatcagcaggccgaggtcgcgcagcttcacatcgctttgtagcagtttatgcgtaccgatcagaatatcgatcttaccctcggcggcttccgccaggatttgtgtctgctctttggcgctgcgaaagcgggacagcatctcaatgcgtaccggccagttggcgaaacggtcgcggaagttgtcatagtgttgctgcgccagcagcgtagtcggcaccagtaccgctacttgtttatggttttccactgccaggaacgcggcgcgcatcgccacttcggttttgccgaagccgacgtcgccgcacaccagcctgtccatcgccagcggttggcacatatcgctcaatacggcgttaatcgcctgtgcctgatcgggcgtcgtttcaaacgggaagctgtcgcagaataactgatactgctcacgatcatgcttaaaggcaaaaccctcttttgccgcccgttgcgcataaatatccaacagttccgctgcgacatcgcgcactttttccgccgctttctgccgggcgcgcgaccaggcgtcgccgcccagtttatgcagaggcgcactttcttccgcgccgccggcatagcggctaatcagatgcaatgaggagaccggcacatacagtttggcgtcattggcgtaggtgagcatcagatactcacccttgatgccgccagcctccagagtggtcatgccggcatagcgtccgacgccgtgctccagatgcactaccggctgaccgacgtggagctccgccaggttacgaatcaacgtatccgggttgatcgtgcggcgggaatccaggcggcgacgcgccacccgctcacccaaaagatcgctttcacaaatcagcgccagattgcgttgggtgtcgataaagccatgttctgcggcgccaatcatcagatagcgtcccgcatcctgcgcctcgtccaggcgtaatatccgcttcggcgcgatttttatgcgagccaggagctctcccagagcttcgcggcgtccttcgctttccacagaaaaaatcaccggaccgctgaaagattcgaggaacttacgcagcgcgtccagcggcgctttctgctgcgcctggatagccaaatccggtaatttctggaaaccgagattggtattggcggctttttccggcagatggtcggttttaagctggaggcgaggccagcgtttaagctcggaaaagagctcatccacccgtagccagagggcttccggcggcaaaagcgggcgcataggatcgacgccacgattttcaaaacgcgccagcgtatcggcctgaaagcgttcggcgctggtttccagcgagccggtattcaccaccagagtattggcggggaaatagctaaataatggcggtaacggttcgctgaaaaagagcggctgccagtattcgatcccggcgggcagagtgcctttgctgacctgctgatagatgtgctcggcgtcgcgttttacctcaaaggtatcgcgccactggctacggaaaagctcaatagcggctttgtcggtaggaaattcgtgcgcgggcaacaaattgatggcctcgacctcctccagcgtacgctgggtatccgcgtcaaacagacgcaggctgtcgatttcatcatcaaaaaagtcgaggcgataaggctgttcgctgcccatcggaaagagatccaacagcgcgccgcgcgtcgcgtattcgccatgctccatcacctgatcgacatgccgataaccggcgctgtcaagctgcgcgcgcagagcgtcgcgggacagccgctggccttttttcatcaccagcgcatgaccatgcagatagctatgcggacaaacgcgctgcatcagggtgtttaccggtacaatcaagacgccgcgctgcatcgacggcaactggtagagcgtggacaggcgcgaagagataatttcctgatgcggggagaagctgtcatacggtagcgtttcccagtccgccaggttcatcaccatctgatcggtaaactggcggatttcatcatgcaatcgcagagcattttgcatgtcaggcgctatgagtaccaccggaccggcatggcgttcggctatctccgccaccagcgtagcgcaggcggcaccggtaagttcgcccaactggcgctgatcgcccgcttttgtcggcagcgtgtaacgttgtttttcaggcataacggttgtcagtatctctttttgttttacgccgcactctacgcgtcacccttcaggctgcttcatggttggctgcacgccgggacagcatgaaggactcaggtattcaggggcatatgactgataagcaatgttctttattatccgcgatcgttgtttattagcaaattgaatccgccgcataacgcgccgaacaggtaaagtatgaacatgtaagtgacttgatttgtcggcctttttcagaataacgctgacgaactcttacggttcagacatttacgcattccgctttcgcttatatactcgggactttgctaacagcaaccagacggattacatgtatcaacctgtcgctctattcattggcctgcgttacatgcgcgggcgtgcagcagatcgcttcggtcgcttcgtttcctggctttccactatcggcattaccctgggggtgatggcgctggtcacggtattgtcggtgatgaacggttttgagcgcgaactgcaaaataacattcttggtttgatgcctcaggccatcctctctgctgaacatggttctcttaacccgaatcagatgccggaaaaagcggtgaatctgcaaggcgttaaccgtattgcgccgctgacgacgggcgatgtcgtactgcaaagcgcgcgtagcgttgcggttggcgtgatgttaggtatcgatccggcgcaaaaagatccattaacgccgtatctggtcaatgtgaagcaaagcgaattacagccgggtaagtataatgtcatcctcggcgagcagctcgccggacagttaggggtcaaccgcggcgatcagattcggctaatggtgccatctgccagccagtttacgccaatgggacgcctgcccagccagcgtctgtttacggtgattggcacatttgccgccaatagcgaggtcgatggctatgaaatgctggtcaatattcaggacgcgtcgcgtttaatgcgctatccggcaggcaatattaccggctggcgtctgtggctggatgaaccgctgcaagtcgataccctcagccaacagacgctgccgcaaggcacgaagtggcaggactggcgcgaacgcaaaggcgagttgttccaggctgtgcgcatggaaaagaacatgatgggattgttgctgagcctcatcgtggcggtcgcggcttttaacattattacttcgttgggcctgatggttatggagaagcagggtgaagtggcgattttacaaactcaagggctgacgccgcgacaaattatgatggtctttatggtgcagggcgccagcgccgggattatcggcgcgctgttgggcgccgcgctgggcgcattgcttgccagccaactgaataacctgatgccgatcatcggcgcgtttctggatggcgctgcgttgcccgtggcgatagagccgttacaggtgatcgttatcgcgctggtggcaatggccatcgcgctgctttctacgctttatccttcctggcgcgctgccgccactcaacccgctgaggctttacgttatgaataagatcctgttgcaatgcgacaacctgtgcaaacgctatcaggaaggcaccgtacaaaccgacgtgttgcacgatgtcagcttcagtatcggcgaaggcgaaatgatggcgatcgtcggcagttccggttcgggtaaaagtacgttgctgcatctgttaggcgggctggatacgcccacctccggcgatgtgatttttagcggccagccgatgagcaaactctcttctgcggcaaaagcggaattacgtaaccagaaactggggtttatctatcagtttcatcatctcctgccggattttacggcgctggaaaacgtggcgatgccattattgattggcaaaaagaaaccggcggagattgacgctcgggcgcgagaaatgctgcacgccgtagggctggagcatcgcgcaacccatcgaccttcggaactttccggcggtgagcgccagcgtgtcgcgatagcgcgcgcgttggtgaataacccgcgtctggtgctggcggatgagccgaccggtaatctcgatgcgcgtaatgccgacagtatttttgagcttctgggcgagttaaatcgtctgcagggaaccgcgtttctggtggtgactcacgatttgcaactggcgaaacgtatgagccgccagcttgagatgcgcgatggccgcctgacggcggaactgagcctgatgggggctgagtaatggcgtcgcctttatcattgttaattggcttgcgtttcagccgtggacggcggcgcggcggtatggtttcgctcatttccgtcatttctaccatcggtatcgcgctgggcgtggcggtgttgattgtcggtttaagcgcgatgaacggtttcgaacgcgagttgaataaccgtattctggcggtggttccgcacggggagattgaagcggtcaatcagccgtggaccaactggcgtgaagcgctggcaaaagtgcagaaggtgccaggcattgccgccgccgcgccgtatatcaattttaccggcctggtagagagcggggccaatttgcgcgccattcaggttaaaggcgtcgaccctaagcaagagcagcagcttagcgcgttaccgtcatttgtgcaaaatcacgcctgggatcatttcaaagcgggcgagcagcagatcattatcggtaaaggcgtcgccgatgcgctgaacgtgaaacagggcgactgggtgtccatcatgatccccaatgcgaatgccgaccataagctgctccagcccaaacgcgtgcgtttgcatgtcatcgggattctgcaactgagcggccagctcgatcacagcttcgccatgatcccgcttgaggatgcgcagcagtatctggatatggggtccagcgtttccggtatcgcgcttaaagtccacgacgtgtttaatgcgaacaaactggtgcgtgacgcgggtgaagtgactaacagctatgtctacattaagagctggatcggcacctacggctatatgtatcgcgatatccagatgattcgcgccattatgtatctggcgatgattctggtgatcggcgtggcctgttttaatatcgtttccaccttagtgatggcggtaaaagacaaaagcggcgacattgcggtattaagaacgctgggggcgaaagatggtttgattcgtgccattttcgtctggtacgggctactggcgggcttgctgggcagcttgattggcgtggcgatcggcgttgtcgtttcgcttcagcttaccgccattattaatgggattgaaaaggcgatcgggcatcagtttttgtccggcgatatctattttatcgacttcctgccatccgaattacattggctggacgttgtttacgtactggtcacagcgttgttgttaagcttactggcgagctggtatccggcgcggcgggcgagcaacattgaccctgcgcgagtattgagcggccagtaatcgcggaatataaaaacaaggagcggtgatgtattacgggtttgacattggcggaacaaagattgcgttaggcgtatttgactcaacgcggcggctgcagtgggaaaaacgggttcccacgccccataccagctatagcgcctttttagacgccgtatgcgaactggtcgaggaagccgaccagcgatttggcgtaaaagggtcggtagggattggcatacccggtatgccggaaaccgaagacggcacgctgtacgccgcgaatgtcccggcagccagcggtaagccgttgcgcgccgatctcagcgcccgactggatcgcgatgtgcgtctggacaatgacgctaactgttttgccttgtccgaagcctgggatgatgaattcacgcaatatcctttggttatggggcttatcctcggcaccggcgtcggcggtggcctggtgctaaacgggaagccgattaccggtcagagctatatcaccggcgagtttggtcatatgcgtttgccggttgacgcgctaacgttgatggggtttgattttcctctccgccgttgtggatgcggtcagatgggctgcattgagaattatctgtccgggcgcgggtttgcgtggctatatcagcattattatgatcaatcgctgcaggcgccggagattatcgcgttgtgggagcagggcgatgagcaggcgcacgcgcatgttgagcgctatctggatttactggcggtttgtctggggaatatactgacgattgtcgatcccgatttattggtgatcggcggcggactatcgaactttacggcaataacaacgcaactggcggaaagactgccgcgccatctcctccctgttgcccgcgcgccgcgcattgagcgtgcgcggcatggggatgcaggtgggatgcgcggtgctgcttttttacatcttaccgactaatcaaaaaaagaggttgttatgcagtcgcgtcggtttcatcgattaagccgctttcgtaaaaataaacgtctgttgcgtgaacgtctgcgccagcggatctttttcagagacagagtggtgccggaaatgatggaaaacccaagagtattagtccttacaggtgcaggaatttctgcagagtctggtattcgtacgtttcgcgcggcggatggcctttgggaagagcatcgggttgaagacgtggcaacgccggaaggattcgcccgtaatccggggctggtgcagacattttataatgcccgccgtcagcagcttcaacagccggaaatacaacccaatgcggcgcatctggcgttagcgaagcttgaagaagcgcttggcgatcgctttttgctggtgacgcaaaacatcgacaatttgcatgaacgcgcgggcaatcgcaacatcattcatatgcatggcgagctgttgaaggtgcgctgttcgcaaagcggccagattctggaatggaacggcgatgtgatgccggaagataaatgtcactgctgtcagttcccggcgccgctacgtccgcacgtggtgtggtttggcgagatgccgcttggcatggatgaaatttatatggcgctgtcgatggcggatatttttatcgccattggcacgtccggtcatgtctatccggctgcgggttttgtgcatgaagcaaaactgcacggcgcacatacggtggaactgaatcttgagccaagccaagtcggcagcgagtttgaagagaagcactacggcccggcaagccaggttgtgccggaatttgttgataaattcctgaaagggctgtagtgctgtttgcccggtaacgccttatccggcctacatttcacgttacgttcatctgtaggcccgacaggcgctttggctgaattagcgtcctgcttttagcttctgataatactcttcataaatggcgctggcgtcgccgacatcgttttgccactcgcctttgctgatggtttgcgcatccggatagagcgacttatcattggcgacctccgggcttaacagcttacgcgccgccaggttgggggtagggtagccgatggtttctgccacctctttcgcgacgtcaggacgcagcaggaagttgattagcttcagcgcgccctctttatttttcgcgtttgccggaatagccaggctatccatccagaaaataccgccttctttcggccagacgacctccagcggcgtgccagcctgacgagcaacgaaggccgaaccgttccacaccatccccagattgacttccccttccatatacggattcgccggattatcggagttgaaggccgctacgttcggcatcagttttttcaactcttcatatgccgcttcgatctctttcggatcggtagtgttaccggaataacctagcttgcgcagcgccatctggaagacttctcgcgcatcgtcggttaaaagcaggctgtttttatattccggtttccacaagtcagcccagctggtaatggtttttggatcgatagcatcgctgttcacgccaatcgccgttgcgccccagatatacggaacagaataatcgttgttggggtcaaacggtttgttgagcatttccggatcgaggttgtggaaattggttaatttcgacttatcgatcttctggatcatgccttctttgcgcattttgtcgacatagtatgtagaaggaacaaccaggtcatacgcgccatctttataggttttgagtttggcatacatggtttcgttcgactcgtaggtcgaataaatcaccttaatgccagtctctttagtgaactgttccagcaggcccggcggcacatactcagtccagttatagaaatagagcgtgtcgttgtcggaggcatgagcggcactcatacccagcgccagggcgcccgccgcgagcaggtggcgtgaccattttttcatttaacgtcccctgaattacgggccttatcggcccttggttttatcacgagcaataagctggctggcaatgaccattaccagagacagcaccaataaaacggtcgccagcgcgttcacttctggtgaaacgccgacttttaccatggaataaatctttaagggtaaaatttcatagcccggcccggtgacaaacgacgagaccactacatcgtccatcgacaacgtaaagctcagcaaccagcccgccgccaccgccggcatcgccagcggcagaatgattttgcgtaaaatcgttacctcactggcccccaggtcttttgcggcttccagcattctgacatcaaagcctttcaggcgcgaatagaccgtgacgaccacaaacggcaggctaaaggtgatgtgcgagaacagcaacgaccaaaagcccagttgaatgccgagtaacataaacagcaccagcagggagatcgccatcacgatatccggcgacatcattactacaaacagcatcccgctgacgaatggcttcccgcgaaagcggtagcgataaagcgccaccgcggttaacgagccaatcaacgtggcgaaggtcgctgaaaaaatcgccatcgtcagtgaatgttgagcggcctgcaacagactgtcgttattgactaggagttcgtaccatttagtggtaaagccctgccagttaatgccgaaccgcgaactgttgaaggagttcacgatcagaataatgatgggaatatacagatacgcatagatggcagtcatgaaaccgccacggagcagccgaccgatcattcaagttccaccttcttattcagaggatggggtgcttttagagtattgaaaatgatcaattttttctcttctccaaaatctctccaaaacgtctcgcggttatcagcagccaggaagaagcaagctgccgcttgaagccgcgaattttacaacaaattgccagacgagcgggaaaaaaaggccatttaaatgactattctcatccgatccggtcatatgcggcattattgtgcctggcaagaggttactcagtaggcaaacaggaagtacgtgagtaaaccctgaacgtgacgtctgagaaagcgtcgtctgattttataaaaaacaacataaacagccgctttgttgttctgagcgaacgtgtagcgtggttaactgttcttccgccattttttgtatagcctgggggtctattctaaaaatggcgtgaaaaacctgatcagagatggcttcgactatctcagctaacatactttggctggtgctgggatccgttacgaggaacgcctgaaacgtcttatccgctagtaaaacctcttttaccattttttcaataggtatgtgggtatgcggtggtggtatttcaagctgttttaatccacacatcgccattgtttctaaaaatgcgttttgctgagtactttcggatatattcgcatggtgtaaaatgcgcgttgtcttttcaatcccagactgaattttcgctgccaggtaggttgccttttcttgcgctttccacccatctaaatgtccttttctcaattcagtatataaatacccctctatgttgtctaatggaaccgataatatcggcgcgccagcaggattgagacataatgtcgaagggagggggtagtctacgatttcgctatatcttctcttaatcatggccgtcatttgtggatgcgattttaaaatatccgggcgatctttcattaaaaaataaagattccccatgacttcacagctaaaggtatcggtattttgagtgatacgtaacaattcgttctcttcgttttgatccatgatgcgaagaataatggtggcatcattttcatgaggattatgaacctgaaatctatctctttgcgatgcgcaggctaactctttcaactcaaaaaaaatctctgtaagccgctctcgtgtgggggcgcgttcggcaaacaacatctcatgtagacaacggtccgcttttgctttgccagtagaaaaaaagaagtctttaattttttcccataaaactttccaccatgcttctttcgtattccttggggagttggtaaggatttcactttttaaaaaaccattccctatagtaatcggcatattaatctcacttatactggagtaaaaatgactacataattgattaaatcgaccctttttatctcaactgcgggcgcatcggatgtaatataatttttaaaagagactggcaatcagtataaaacctgagagcttcgcgtataaacgcattactgtctgtgatagcgtcgctacaggtaaaaataaaagaaggactaccgcggatgatgttgtagatttgcaatactggcggcaacttctttcatgcgttttttatgccgaaggcatgaagtttacccttgaataaacttcatgcctggatgcgtgtggatttgttagcgttgcgcaattaatcgcttatatcactcaccttcttattcaataagcgggaagcccgccagtaaatcaacagcatgagtcccatcacaatggtcagcgtaatgctggtagccgcgccaaacggccaatcgcgaatattcaggaactgtaccttaatgacgttaccaatcagcaggtttttcgcgccacccattaaatcggagacgtagaacaggcccattgccggtagcatcacgagcaggcaaccggcgacaatgcccggcatggttaatggaataatgatgcggatgaacgtttgcattttactggcgccgagatcgcgtgcggcctccagtagtggtttgtcgagcttctcaatgctggagtagagcggcatgaccataaatggcagcaaaatgtaaaccaggccgataataacggcgctcggggtgaacatgatgcgaatcggtgtatcaatcacgcccagccacagcaggaattcattgagataacctttagtgctcaggaatattttcagcccatagatgcggatcagtgagttggtccagaaaggaacaatcagcaaaaacagcaataacggacgtatcttttccggtaacttcgccagaaaccaggcaaaaggatagcccagcaccaggcaggagagggtggcgatcagcgccatattcagagagtgcaggagcacttcaaaatagagcggatcgagcaggcgcgcgtagttatccagcgtaaagaccatcttgacgaaactggcgtcgtcacgggtcagaaagctggtgccaatgatcatcaggttgggcagaaaaacaaataacacaagccaaccgacgatagtgacaatcactacattctggaatttacttgtgttcttcatcagccagtacgacctcccagctttctacccaactaatggccattttttggtcaagtgaatggtcgaagtcaggatcgtcttcgttgaagaattcgctgaccatcaccattttgccattttccagttcaaccaccgactccagcgtcatacctttataattgcgctcgcgcacgtagccgataagcccttcgatgtggttatcatcgttgatctcttcgacgcgtagatcttccggtcgcagcaggacgttcagtttttggcctggttcgacagcgaaattgacgtatatattgcactcccgaccttctacgctggcgcggacgcgctgttcatcaagccgttcaatgacggttgcgtcaaagcggttaatttcgccgataaaaccggcgacaaacaggttttttggctcttcatagatttcacgcggcgtgccgtcttgctcaatcacgccattacgcattaccacgatacgatcggacatggtgagcgcttcttcctgatcgtgagtgacaaaaacaaacgtgataccgagtttacgctgtaatgctttaagctcgttctgcatttgtttgcgcaatttatagtccagcgcggaaagcgattcatccagtaataacaggcgaggtttattcaccaccgcgcgagcgatagccacacgctgctgctgtccgccggaaagctggtgcggtttacgttgtgcaaactcttcaagctgcaccatacgcagcgcatcggtcacgcgaggcgctatctcggcggctggcgttttttgcatccgtaagccaaacgcgacattttcaaacaccgtcatatgcggaaataaagcgtagctttgaaatacggtatttacataacgattttcggcgggaacgtgggtgatatcctggttatccaacatgatatgcccggcatcaacggtttccaggccggcaatcaggcgaagaacggttgttttaccgcagccggaagggccaagcagcgtgaggaattcgccattgttaatggtcaaatccagttgcgaaatgacctctttgccatcgaaacttttgctaattcccgacaaaagcaccagcggtgaaagcgaacgcggttgattattcaatttcttactctgtcccatgtaaacgcaacggatggctgaccgctgcggggtttgtggttaaccaccttaatcactcttaatgagggcggtcattctacggcaaaccactgtgatcgccaatccttgttgcgaattactgacttagctttatagtcagaaagcgtgtcaaagtgaaatattcttgtttgcagggataaaagtgacctgacgcaatatttgtcttttcttgcttattaataatgttgtcacgaaaagtgagggtgactgcatggataaactacttgagcgttttttacactacgtatcgctggatacccaatcaaagtcgggtgttcggcaggttcccagcactgaggggcagtggaagttactacgtttgctcaaacagcagctcgaagagatggggctggttaacattacattaagtgaaaaagggacgttgatggcgacgctcccggccaatgttgagggggatattcccgccattggttttatctcccatgtggatacctctccggatttcagcggtaaaaacgttaacccgcagattgtcgagaattatcgcggcggcgatatagcattagggattggcgatgaggtgttgtcacccgtgatgttcccggtactgcatcaattactgggacagacgctgattactaccgatggtaagacattgctgggcgcggacgataaagccggcgttgcggagatcatgaccgcgctggcggtgctgaaaggtaatcctattccccacggcgacattaaagtggcgtttacgcctgacgaagaggtagggaaaggcgcgaagcacttcgatgttgaggcctttggcgcgcagtgggcatatacggtcgacggcggcggcgtgggagaactggagtttgaaaacttcaatgccgcctcggtgaatatcaaaatcgtcggcaataacgtgcatcccggtacggcaaaaggcgtgatggtcaatgcgctgtcgttggcggcgaggattcacgcggaagtgccggcggatgaagcgcctgaaaccaccgaaggttacgaagggttttatcatctggccagcatgaaaggcaccgttgaccgggccgaaatgcactacatcattcgcgatttcgaccgtaagcagtttgaagcgcgtaaacgcaaaatgatggagattgccaaaaaagtcggtaaggggctgcatccggactgctatatcgaactggtgattgaagacagttattacaatatgcgcgaaaaagtagttgaacatccgcatattctcgatatcgcccagcaggccatgcgcgactgtcatattacgccggagatgaaaccgattcgcggcggtacagacggggcgcaactgtcgtttatgggtctgccatgtcctaatctctttaccggcggatataactatcatggtaaacatgagtttgtgacgctggaggggatggaaaaagcggtacaggtgattgtgcgtatcgcggagctgacggctaagcgcgggcagtagcgaatgttacgcattgtggtgaagcgttttattatttatggcgggatattttccgccataaatttttgtctatggaaaacccccagctaggctgggggttccggaaagctttcagctttaagccagttattaaaaccccttttgatttgttaaaacatcttgcggtctggcaactgcaaaagttcaacaagaaatcaaaagggggtcccaatgggggacgaaaagagcttagcgcacacccgatggaactgtaaatatcacatagttttcgcgcccaaataccgaagacaagcgttctatggagagaagcgtagggcagtaggcagcatattaagaaaattgtgtgaatggaaaaacgtacgaattctggaagcagaatgttgtgcagatcatattcacatgcttctggagatcccgccgaagatgagtgtgtcgagtttcatgggatatctgaagggtaaaagtagtctgatgctttacgagcagtttggggatctaaaattcaaatacaggaacagggagttctggtgcagagggtactatgtcgatacggtgggtaagaacacggcgaagatacaggactacataaagcaccagcttgaagaggataaaatgggtgagcaattatcgatcccgtatccgggcagcccgtttacgggccgtaagtaacgaagtttgatgcaaatgtcagatcgtatgcgcctgttagggcgcggctggtaagagagccttataggcgcatctgaaaaacctccggctatgccggaggatatttattctgcctggagcgccgaatatacgccttcctggtcccagcgccagcaacaatctgcagcatgttttatgactggcgatgaaacctgcatgacgtttattgatgatgcggtgaggctggcctcgcagcaatatggcaaacgctcaatacagcttgttcgtagcctgctattacaaagcgatatttatcaatggctgggtaaaccggagttaacgccgcaaatgctgctgcgagcgcgggcaataatgaaaacatttccggcggacacttatccgggcgatcgggccgatatgtttgaacacctggcggcctttaatgtttacagtgacgatcgttatatagagtattcaccgacagagcagtggcgatacgagatcaaggttgattaccgtcagcagatagcctggcaagagcaggcattaacgtggcgtcttaaagacaaaaaggcatcgacggaagcattggtttataccttaaacaggatgcgcgacgcttattctgatgcgctggaagagcgggatgtcgaatgtgatagtgcgcgtaaagcctattatttggcgaagatagacgcaacggagcggcagtggctgagcgttattttacgagataaaacctgggataatcgtgagcgcgtcgcctcttttttgcagcagaaagcggatattgcttataatgcagggcatattagcgaggcgattaatgcgctaagtcaggcgctaaaaattgagcaaacgctttatggcgccgaattcggcgaaatgacggttgacagcaataatcttgctggcttttatgcacagggccatcattataaggaagcgaaagatctctaccttaaacttatcgcgtattaccagagccgtttaacgccaatggcgacggtaatatcacgattacgcttttatttgcccgaaaacatcgacctggacagtacctccctctatctcccattgctggcagaatataaacgtcggcagtccgacgtatcaatggtgttgtatggtatttcgctgctttatcagagtaatcaagaacttgaacaagcaaaagactttgcggaacgcgcctttacgcttgatgccgtagcttatccagcaaagatgcagtatgaacgattacagcaactggctaatattgccgaaggtcttggagataacgtactggcgcggcgctatcggcaaatgtcatttcgccatcgaatggcccactcgatttatccgggcgatccgcaatataacgatgtcgccaaacctggcggcgatcgttgtggatagtttgcgtcagcccggcggtcgccgggcattgcgatgttcttatccttcgaagaaccagtacccgctattcaccagcgccgccagcatcgcgaggaaggacgggtcttccagcgcatcgccgaagttttcagcggtcagtgcaatatgactggcgagcgcctccagagcggggcgatgcggagagtctattttttcgccattcgcatagacctcatcgccgatacgcaatacgcgaagcccgccgagacgtactaatacctcgccttgctttaaggcatcgtaaatttcatcaggctgatacggcggctccggcggcgcaatatccagttcgtggcgtgactgagagagaaactcgccaagccactgttggaaatgcgcgggttgattgatcaaatcgagcatcatattacgcagtttatccatctcctgcggcaggatatccgccggatgcttgcgggacggcatatccggatcgctgtagtatgtattgcccaactcccgttgcaggacgtaatcggcaaaaccgctgatcagctcacggctattgggcgcgcgaaaaccgaccgaatagttcatggcgttttccagcgcatagccttcatgcgggaatcctggcggaatatacagaatgtcgcccggctccagctcttcatcaataatggcctcgaacggttcgacttgtaacaggtcgggatgtgggcagtgctgacgcatttgcagcttttcgcccacgcgccagcgacggcgaccggttccctggataataaacacatcatactgatccagatgcgggccaacgccgccgccgggaacggaaaaggagatcatcagatcgtcgatacgccagtccggcagagcgcggaacgggcgcatcaacgcggcggtgggttcgtgccagtggtttaccgcctgtaccagcagcgaccagttgctctcacccagatgatcgtagctttcgaaaggaccatggctgacctgccatttgccatcctgatggctaacgagtcggctgtcgatttcgctttccatcgccagccccgccagctcatccggcgagagcggatcgataaagttgctaaacccacgttttaagaccaccgggcgtttttgccagtggcgttcaagaaagtcgggccagttaagagttaattggtattccatgttaagtatccgcaggctggtatctgacaccgattataacggatgcttaacgagatgcgtggaagaacgcacagaaatgtttattcctctttctgtgtgggatgctgtcggccaaaaacgacctccatacgggcgccaccgagcagactgtcgctggcaatgatctgcccggcgtattgttccgtaatctcgcgcgcgacagccagccccacgccttgtcctggtcgtagggtatcggcgcgctgaccgcgatcaaacaccagggaacgtttgctgtggggaatgcctgggccgtcatcttcgacgaaaatatgcaaatgatcgtcggtctggcgagccgaaatctcgacaaactccagacaatatttacaagcgttgtccagtacgttgcccatcacttcgacaaagtcgttttgctcgccgacaaaactgatttctggtgaaatatccatactgatattcacccctttacgctgataaactttatttagcgcagaaatcaggttatctaacaacggcgcgacgggatgcagttcgcggcttaacaacacgccgctaccgcgcatactggcgcgatgcagataatagccgatctgctgggaaatccggctgatctgttccagcatcaccggttcagctttgctgacgctcatcttttcgttgcgtaaagagcgtaacgtactctgcaaaaccgcgagcggcgtttttaaactgtgcgtcaggtcggtcagggtcgtgcggtatttgttataacgttcacgctcgcttttgagcagttgattaaggttgcgcacaaggctggtcagctcacgcgtcgtctccggattgagcatttcgcggtgatgatcttcaagctcgcggacttcccgcgccagcgcctcgatagggcgtaagctccaccaggcggcgatccacagtaaaggaatgactaacagtaaattggcggccagcacgtatacgaaccagctccacaccatataggagcgttttagttctatcggaatggtatcgaccaccacgatggttaactgcggcatccgcgccgtggcaggataaatatttaccgctaccgagtgggtcatctcggcatcatcgtcatcttcacgtacttctttgagtttttcctgcgcggaatggtcttcgctcaacagcgtgctggtggcgtctacgttggtttcaatttcatggaagccgttcgtttttaaccattccggttgaatgcttttaatcagccagggaatgttgcgctgcgtccataataatttgcccgtttcatcgtaaatcagcgtcatggtcgggctttgcatgtccagattttcaggcagctcaacgctgattttattattttcccatttggcgagggtataaaacaggttgctttcgccgcgcagcaaacgaaaggtggttttatcaaaacttacgctatagccgaccagcgccactatgccatatgccaaagaaagcaccagcacgacgccggctgtcgccagcaaaaaacgaacccgcagcgacagcggcagaaaatggcgagcaaatttattcattagcgcaattcaaaaagatatccttgtccgcgtacggtggtaatgacatcgtgcggatactgggcctgtatttttttccgcagacgccccatgagaacatcaatggtatgactttcccgcagttccgcatccggatacagctgaagcatcagcgaatctttgctgaccactttaccgttgttacggataagcgtttccataatggtgtattcgaacgccgtgagtttgatgacctcttcattgacggataattcccggcgtgagagatccacctggaacggcgggatgttgatcacctgggaggccagaccgctattacggcgcattaacgcctgcatacgcgccattacctcttcgatgtggaatggcttcgtcacgtagtcatcggccccggagctgagaacctcgactttatcctgccagccttcgcgcgcggttaacaccagaaccggcagtgaaacatcactgctgcgccagcggcgtattaaggaaaggccgtcttcatccggcagacctaaatcgacaatagcgatatccggaaggtgttcattaaggtagtaatcagcttccctggcatcttctgcggcatcgacctggtgacctgaatcctggagctgaaccttcaggtggtggcgtaataatgcattatcctctacaaccagtacgcgcatcatctcttctcccttgtgttaacaataagaacagtctagcgttgattatggtgctttggggataaacagttaataaaccagacaaatagtcaccctctttctgaagaaaagagggtgaggcaggcattatttaagttcgtcgaccagagtcacagcgcgaccgatataatttgccggcgtcatggctttaaggcgcgttttttctgcttccggcagggccagactatcaataaactgtttcattccttcggcatcaacacgcttgccacgggtcaactctttcagtttttcatatggtttttcaataccatagcggcgcatgacggtctggatcggttcggctaatacttcccagttgtgatccagttcgtcaagcagatgatcgcggtttacttccagcttgctgacgcccttcagggtggactgataagcgataagcgcatagccgatgccgacacccaggttacgcaggacggttgagtcggtcagatcgcgctgccagcgggaaaccggcagtttgtttgccagatggtgcaacactgcgttagacagaccgaggttgccttctgagttttcaaagtcaatggggttaactttatgcggcatggtagaagaaccgatctccccggcgatggttttctgtttgaaatggttcaacgcaatatagccccagacatcgcgatcgaaatcgatcaggatggtgttaaagcgcgcgatacagtcaaacagttccgcaatataatcatgtggttcaatctgggtggtgtaagggttccactggatgcccagcgaggtgacgaactcttcgctgaactgatgccagtcaacttccggataggcggcgatatgcgcgttatagttgcctacggcgccgttgattttaccgaggatctccacctggttgagctggcggaactgacgctccatccgatacgccacgttcgccatctctttacccagagtggaaggtgttgccggctggccgtgggtgcgggagagtagaggaatatcgcgatactgcgtggcgagatctttaaccgcgttaatcacctgacgccagtaaggcaggatcacttcatcgcgcgcggttttgagcattaacgcgtgcgacaggttgttaatgtcctcagaagtgcaggcaaagtggataaattcggaaacgtcatgtagcgccgggatcgcggcgactttttctttcaggaaatactcaactgccttcacatcatggttagtcgtacgctcaatggttttaatgcgcgcggcatcttcttcattgaagtttgccacaagcgtatccaggtaaccgtttgcgtcggcagcaaaagcaggaacttccttgatcgctgcgtgcgcggctaatttctgcagccaacgtacttcgacttgtacacgaaatttcagcaaaccgtattcgctaaaaattccgcgcagcgcgctgactttatcgccgtagcgtccatcgacaggggaaacggcggtcagtgaggataattccatagatcataactccggggttaaatgagcaagaatttgttttgcctgagtcgtcaggcgatgacgagaaaacataagctgtaggcgaccaccgcctacctgatgccagagcacggctgcacggatgcctgccagtagcgaggcgcggactttggcctgcacctgcggactttgcagaacggccggggagcccgtcacctgaatgcgcgggcccaatgggctaatcacatccacgtagatgcccgccatggcgctcattaacgtgtctgactgtaaatcaaaatgatcaagctggcgctgcaggccgttaatgcgatcgcctaacgtattcaatgcgcctttggcggatgacagcttgcgctccagcaccatcaggctaagcgtataacgcgtcagttcggcgttaagtccttgtcggctgctggcattcagcacgccgagcagtgtttccagaccaagacgcaggttggcttcgctgccgccgaacacgcccagagtagaactgggattcatatcaatgacactgttgagtgaaacgtgcaacgcgtcggcatcacagtgtccctggtgcgccagttgttgcaccaggcgtgccgactggcaaatgccagacagcgcgagggtgatgtcataataattctttgccacaatcactgcttccttgtatcaaataaaatacacttcatcttttaagccgctttgaggcgacttgaatggtgttgtgtattgaataatcagaccgtcagcggcagtcgctgctcgataatgccgccgcccaggcagacttcgccgctgtaaaagacagcggactggcccggcgtaacggcggcaaccggctcgtcaaaaatgacctcgatacgatcgtcattcagcgcgttaatcgtgcacggaatatcggtctggcggtagcgggtttttaccgtacagcgcagggtgccggtgaacggttcgcgatcgacccaatgtagctgctgggcgatgaggcctaccgacatcaggcgtgggtgctcatgcccctgggcgacaattaacacattgttttcaacgtctttatccaccacataccaggggtcttcgctaccgtctttggtgccgccgattcccagccctttacgctgaccgagcgtatgatacatcagaccctgatgctcgccgatttcatcgccgtcaacggtaatgattttccccggctgcgcaggcagatagcgccctaaaaagtcgcggaatttgcgctcgccgataaagcagataccggtagaatcttttttctttgcggttaccagccccagatcttcggcgattttacgcacctgcggtttttccagctcgccaaccgggaacagactttgcgcaatctgctcatggccaagcgtatagaggaagtagctctgatctttgttaccgtcgagcccgcgcaacaaccggcttttgccgtttacatccgcgcgacggacgtagtgaccggtggcgatatagtcggcgcctaaatcttctgcggcaaattcaaggaaggctttaaatttgatctctttattgcacagaatatccggattcggcgtacggcccgctttgtactcttcaaggaacagttcaaagacgttatcccaatattctgcggcaaaattaacggtatgcagttcaatgccaagcttgtcgcacacggcctgcgcgtcagccagatcggctgccgcggtacagtattcctcaccatcgtcctcttcccagttcttcatgaacaggccttctacctgataaccctgttgttgcaacagccaggcggaaacggaggaatcgacaccgccggacatgccgacgatcactttttttgggctttctgacattggaatactcgcgacattgaacttcaaggcggcgtattctatcacgcagccctttacttgacaccctctgtaaacggccagttaaattcgcccactatagataaggggtaacgttgtcccgtttgataactgcgaacgctttcagccaccagcggagaacgtaaattcggcgcgttcagaatctcgtcggcgctcacccaacggcagcaatcgatgtcattgtcatgggggtcggtcgcgcaaatatgatcaagcttgatagcgaataaaaagcgcaggaacggggttttatccggcgcaatccactgatgcatacggataaaatactgtggttgcgccgtgatgccagtctcttcccacagttcacgcgcggcggcctgcgccagcgtttcatctgcctccaggtgtccggcaggttgattccataacgatttaccgttgatggtctcttctaccaccagaaatttatcttcggcatgtacgatgcaggcaacggtcacgtgcggcttgaacataggcatccttattaaagcggtttatcaatgtggtcatagatcacgtcaagctgtttcagacgctcgttataagcttttgtcaggcaggtgacgtcggccttgcactgctgacgctgtttaagccagctctgctgggcgtcctgcagggcgccgcgactgcccatcgcgaacaaccctttcagaaactgatatttggtgtgcatttccacgtctttatcattcagcgtcaggtgcgcgcagatagccttttcatccgcagcctgcgctttctggcagtcgaagctggccgcattaacggataacggtgttaataaagcaaaagcaatgagaagccgtttcatctgtctttctcctgtgcgatctcgcgccactgtccattatcgaggccgttgagcgtgtagtcgcccatgctgtaacgaattaatcgtagagtgggatgaccgacatgcgctgtcatgcgtcttacctggcggttgcggccttcatataaggtgacttttagccaactggtgggaatattcttccgttcgcgaatcggcggggtgcgcggccacagccagtcaggctccgcgacaatctcaataccggcgggcagggtagggccatcgttgagcgtgacgccagtacgaagcgcctgcagcgctgcattatccggtataccttctacctgaacatagtaaatcttgccggtgcgtttgcccggttgcgtgaggcgcgcctgcagcgcgccgtcattagtcagcaccaaaagcccttcgctgtcgcggtccaggcggcctgcggcataaacgccttgcacaggaataaaatcttttaacgtgcggcgacctgcttcatccgtgaactgcggcaacacatcgtaaggtttattgaacaaaaccacgcgttttggctggttttctttccgtgatttagatgcttgtcgtgagctgaatcgcttaacgtagtgatttctaaaagaagttttttgcatggtgttttcagaacttattaattgccgcattatagcgcaataatgagtgtctttcatggcggcaaacaatagggtagtattgacatgctcattacaaaacattaacaaaaaattgctctaacgcagtcgtgcagcaggacgccattgcacatgcagcgcgatgacagacgagcaaaccagaagcgctcgaaggagaggtgaatggaaagcaaagtagttgttccggtggaaggtaagaagatcaccctgcaaaacggcaaactcaacgttcctgagaatccgattatcccgtttattgaaggcgatggtatcggtgttgatgtcactccagccatgcttaaagtagtcgatgccgccgtcgagaaagcctataaaggcgagcgtaaaatttcctggatggaaatttacaccggagaaaaatccacacaggtttacggccaggatgtctggcttcccgctgaaacccttgatttaattcgtgactaccgcgtagcgattaaaggtccattgaccacgccggttggcggcggtatccgctctctgaacgttgccctgcgtcaggagcttgacctgtacgtttgtctgcgtcccgttcgttactatcagggcacgccaagtccggtgaaacatccggagctgaccgatatggtcatcttccgtgaaaactctgaagacatctacgccggaattgaatggaaagctgactctgcagacgctgagaaagtgatcaagttcctgcgcgaagagatgggcgtgaagaaaattcgcttcccggagcactgcggtatcggtatcaaaccgtgttctgaagaaggcactaaacgtctggttcgcgcggcgattgaatacgctattaccaacgatcgcgattccgtcacgctggtacataaaggcaatatcatgaagttcaccgaaggcgcgtttaaagactggggctaccagttggcgcgcgacgagttcggcggtgagcttattgacggcggtccgtggctgaaaattaagaacccgaacacgggtaaagagatcgtggttaaagacgttatcgccgatgcgttcctgcaacaaatcctgttgcgtccggcggaatacgacgttatcgcctgtatgaacctgaacggtgactatatttccgatgccctggcggctcaggttggcggtatcggtattgcaccgggtgcgaatatcggcgacgaatgcgcgttgtttgaagcgactcacgggactgcgccgaaatatgcgggccaggataaagtcaacccaggctccattattctgtctgcggagatgatgctgcgccacatgcagtggttcgaagccgcagacctgattgttaaaggtatggaaggcgcgattgccgcgaagaccgtgacctatgacttcgaacgtctgatggacggcgctaagctgctgaaatgttcagagtttggtgacgcgatcatcgaaaacatgtaatccagtttttgggttaaacaagaacgggagccgaaggttcccgtttttattaccttcttaaagttcttccccaaaactttccccaaaacgtttccccaaaacccttatgatttcaccctgtttttgtgttgacgatcacccaatcttttcctctgtcatcattatatttgtctgtcatttttcttgatttatggccgagtaatttttgcgtgtcgacaccttgttctctgtacaagcgttctgataatgatctctgttcgtgaaaagtgggtggggatcccttatcccatttcagtccacttctgtcacgtgcttttttgaatgttgaagttaaagaactggttgaaacctgatcaccgcggtttgcttgtgaggtggtatgtctgaaatgcacaagatatttactgatgactgcatcccggcatttagatacaacgtcccgaagagttaaacccagggcttcacatttcaagtccaatggtatggctaaacgcgatcctgttttttcctgttcgacatggagcatatcgtcccatatgtctttaaacttcatgttacagatatcgcccaaacgctgacctgttattatcgcgagcaacattccacactggaggtatggttcttgcttttcggcagcttcataaatagttttccactcttccagagaaagacgctgacgagtgactctgtttctcggctgcttggtcgccagggcagggttatagcctggagggacatgaccgttatgttgcgcttctttgaatacatcaatcaaaaccatgcgaacaacttgcgccatacgattatggccttcagccttaactgcatccgtgatctcagagatatccaatgcggaaatatctttcaaatattgcataccgcaatgttcgcgaaataacctgactggttttgctttctgtcgataagaattaggtctgagttcacggtgttttaaccgttcgtcctgaatttcaatatacttatcaatccactcagtgacagtaatgtccgttcttctgcctttcattctggcaagacggtcgttaacactaagaacctgcctggttctttgttctgcaatgatcgtgttcgcttcggatgcaacctttttagcttccacttcatcagtacccaagctgtgaaagcgtccggaaacaggatgtttatattgccaataaatcttgcccgtccgcttatctagcttgcagtatagattcggaattgaaattttgtgagaacgtggtctagcagccatctgcaataatccgttgtaatcttggactggcgtttgccggaattttcggttcggcaagcgtaccaacaaatcgagcattacggtctaccatccagtaacgacctacttttacagctggaggtatcatcattttgcctttagcgtatttcttaaggatacgctcacttggtgcttgcgctccgaactcttcattggcccagtcgagtaaggggatcattcgtgacatttatttttctccacaaagcccggctgcacccgggctataacatcaaatatcagtgctggtggtcggtattaatatcaaccagataaacacccggaattaccggagagttgccagcctgccccattattttctcgtattcggaaatctgatgatctactggttgtgacaggtcgcgatatttactctgaagcagggcgacgcggctttctgtccatgccttccacatatgccgcgtgtagctgtcagcgtagttttcgccatgaagaaacttacccattgcgaaatcatattcttgccgctcgcgcccccacttcttaagcatccacgcctcaaattcagcgcggccatcatccggcactaccggcactggctgggcgctgtactcatgtgccacagccatttgtgggtgattgggattattacacggtactccacacacctcacagacagcgtgctgtatcccgtccagcctgcggcgttcctgtagctctcgcatcgccgctgcaatatcggtgtagtcagtcaaaactgaatcgtcgcagatttcagcgcgcgccagaatttcagctattttcctgtctgttagtttgttattgctcatcgcaatacatcctccacactgattaaccctttacggctcaaatagttcattgcggcgccgtgtaacttgctgttcggcctggcgtttctaagcgagtgggccagacgcttaatccacatcgttaattcttccacttgcttttctgcttcttccagttgttcgcgcacctgtcgcatatcatcacgctgagtaagtgccgattcaggcatggaatgttcggcacacgggattattgtgtgaacgtctgagtattcgccgccgccgtcactgaatgccattacacaaccacactttgatttgccgttcacaaagacaattttgttactcataatgaccgtcctgcacgttgcgtaaccagatacagaccgcgccgtcttcggtgtcgtgaatggaaccgacaaaccagccgttacctgctggcggatctggttgccacgttgaaatgtcgcacccgtcaacgtcaggatctatttcctcgtcatccaggtatgagactttccattccaaaccgttagcttccagccaggcatttaactcgtctggagagataacctcacgaccatcgcaaaactgttcgtacagcgggtgagtccagtaaccgtaattatcgcgctctacgggtaatgcagtgattttgttcattatcatttcaggcggtcagcgaccgccagcctccgttatgcggtcacgttctcttccacgccagcgttttcgacgacgctgtactcacctgtgatgacagacgcatcagccggatcgatagtcagcgtctccttttcgtccattgataccgcgcgctggatctcaatggatacaggcaggtatttgaacaggcggcgtatggcggttttttttgccatttcctcccagtgagtaacccacgggccgttgttaccggctttgctctgtgcccgtaccagctctatctgtttacgggtcattacctcaaactgtgtgccaccatctttaaggcgggcaacggcatagacatgagtaactggtgcatcttcgttctcacccggacggtgtaccagcttctcttccagaccaaactcgaagctgaaatcgtcaccttcgcggacgatgcgcgcggaaagacttgcaatctgtccggaacggcgggcaaggtcgatcattccccggtagccaataattaactgaacgtttttttttcctgacttttcgtttttgtttccgaacggcagcagataggcatgaccgagcgcgccgccgggctccagcccaagctgggaacactgaacgatggcgctgacaaaactcatggtgtcacagtcacccagcgccggaacttttcggatttccgttgtggctatccggatcatgcgttccgctgtcatgtggcggggcagggccgccgccagctgttctttcatggaaggctggttgataaagctgatcacatcgttgttatttttcactgccgtcggggtgcgtgctccctgtgttttttgcaggtcggcttttgcaataggtggctgtttaggcatttgcattctccttcgcccagcggggcagtgataaagttttaatggcaggccattcatcgttattaaggcattcggccagggtttgcagattgcgacgatattcccgctgacctgccagttttgcgtcttcacccatcatgaaaatctcaaccgggtaacgcccacattcggcggttgtactggcaacaaggaagacgaaggtgggtctctcaccgaactgcgcccgataaccgtcgctgtagaaagcgtcctgtacgtggtagcgataatcgtaataagctgtcctgaaccgctggatatcagcagtggttttcacatccatgatccagtgaaattcagggatgattttgtccggacggcaccgacataaaattcctgtttccggatcttcccagtagactgatgattcagcatatccggcgctttcaaccagccactgccccagcggtaacaccatcacactctggtacataagttcgattttccggccttcttctgccgtaagcacggttcttcctgtccgggcgcattcctccagaaaggttttctcttcttcttttcctgcactggtacggcggttaaactccggtgcgatgatgaagcgtttgctgaattcctctggttccagtacccggcagtgaaaagccgttcctgtatcgagagattttgttttctccgtgtccacgggggcatttttgcgccaaagataaattgctggtgtatctgcgatatcatcaagctgtgatttactgacccccgggccagcgtgatacgcctcgttagggatgtcatagtaaatgcctggctgtatatcatcaggtacagtgatatttccgttttctatggaatctgccgcttcgccagcttcatcaccgccagtacctgatccaccgtctgctgtaatttcctgcactgcatcgccagccgtttcctgctggttgctctctttcggcgtttttccatctctttctgttctggcttccgttttttcggtctggtttgaggggggcgggaatagcgctgaaacgtcgaaagtcccgtctgcgtttctggtgacagcctccggctctgctgctggttgtttttcctccggcaccacttcttctttttcaccctgatttgaggcgctgtaattgttatgaacccacttcggatcgttcgggtcactgatgccttcgacatattcaccgcgcgcggctgccagttgtttaccaacatcaaccgggtttttgggtggaatgtttttacgtgcttcgtgcagttctgcgcgtattttctggtagcctgcttctgtctggcttacaggtggctcattctccagcggctgcgggtccggatgatgttcagttgtgtcctgttccactgtttcaggcgttgctggttcatctgccagttcgtctgtcggttgcggtttttcttcatcacactgaaatctccctgactcaatatcccgcagacatttgcccgcctgacgaagtcttgctgcattttcttcatgggttgttggggtgttatcaggcacatattcgtaccagtccggatcgcgaacaccatgaacggcaagaaagctttcgcaccacgtccggcgaagatcaggattaccgttatgtacggcctttggcgctttgcgtaccaggtcaataatggtctgtcggtcgtagcctttgatgtcgggaatagtgcccactgtcatcgacattcgcttccagtcttcccggtcttcggcgatgatacgttttgcaaaatccattgcaggacgcaggttattcagaaccagctcctcacagaaaccacaggcgagctcatagttaatcgttctgtgtgtcggtttttcgctacggcgtggacgttctggcttatttacgtcgtcgacaattactttatgttgcccggtttttttaacgggtacaggtttattcttcaggcgttcagcccattccttaaccagcaggccgcggttaatgtgttcagcactgaaccattccttaaaaaacttaatagtggtgcataactcaggtacttttccatcgacaggaaatacctgtttatacgcattcactgctttgtgaatatcgtgctcgatagcttttttgaacggctctacattttctgctgcgagtatcaggttctgggcagtggtattctgagtatccatctccagacacgcgatttcttttttctggtctgtatcgacgtgataaagatactcaccttcacctatgtactgagcaagaacgcggtgacggagaggcatagttgcgacaacagtcagctcgggggctggggctgttgcctgggcagggctgttgctttcgttaccaaaattttcggtgtggtcttccagcacttcgcctgtttcggtatcaacaccatcgacgatatgctggcgcgccgcggcggcggcttcagatgatggcagggtgacgccggggatttgttcccaagtcatgccatcttcaccgaggcgataataattagtgaaggtaaaacttatttcaccttccggcggcagctcgttgactaccggaaaattggtgcggatcggccttgcataatccttaccgcggccggtttcaatttcagcatcttccagaacgacatccagcataaggttggcgcgcgcttctgattttgcagtgaaccagaccgtcgcatcttgctttccggatttctgcgtagcttttactacatagaaaaattccatgtgagatcctcttttttagatgtaagatccccgggccagagatagcgcccattgggtgaactttggttttttgtgtagttttccggtggaactttggtcggtgtcaccggacgtatgggccgccttgcgcggcttttacgttaactttcgtgcgccatctggtcgtatgaggcacaacgtacagagcagtaatcgcgctcttcatgtgtcagctgcgcgccgcgaatcagcgtcagctcgttttttacttctttgccttgctcaatcgtctttccacacaggtggtaagcgcatgtcttttggttatgcatccggatctcctttctgcgccagcaggtagcagaggcggcggattaaaacctcaatccggttaagcaggacggcctgctgtcgagctggtttacgtgcgaaatcaatcatcctcaccctcgtttgccttatcgccggccagcggaacgtttatcaccttctgcgcgttaacttttccacctcattccggtcttcgtatgccccggacggctacattcgtgggcgtcctgcctgggtggttcgttgttgctatggaataagtaaagcatcattttacttttcagtcaacctttgcggaattaaagtgtaaagcaaagctgtacaataagcgtgttcatttttgaactatgtttagcagctcaatatgtatatgattaaaaaaacatcagtaaggggtggttatggatcgtgacgagctggaagaagaccgtgcagcattcattgcgggtgagattggcggcgcagtggtcgaattgataatcgacggcgtagtgatcagccgcgatgcgattgtagatagtctggaggctaagcgcagagcagtgggaaacgtcattcacaagggtgtattgcgggatgcggccgctatggtaagaaaagggcaataaaaaacccggcacagtggccgggttaaattattgttgccgtgtaagtaaagccgctattgcatttccactgtattttgaatattcaatcctgaattagttatccaaaattataaacatttaacaactgtagatacgtcagattctagcgcttcaatctgagctttgttggcttgagtagccataccatagatggtatagcttttgtgctgtagtttacttaacggacacccttcatggttaataatagctgcaagcgtgttgccatccttcacattttgaactctttcagaaagatttccgctagtgaatagatgagggtgagttttcaagagatcatcggtgattcgtttgatctcttctgcatgtgatttaaatgccttagctgcatcactttcgttagtacgggaacgattctgtacaaaaagatgtaacttagggagctcaataaggttttggatagcttctttattgaaatcaaggaacatctcgtcttgttctgacttgtctattgatacaccgtaaatgagcttaacaaggttttttatgccccgaattgatgcagcatctgctgtgcaaggaatgattattctgtttgcggcgaccacacctaactcagtgtagcttgcgaagcttgggttgcagtcaataaagaaagtttttgccctgtcagaaatactcttatcggcttcgagtgatgcgattaagtccactaacaaagaacgacttttcttccatgcttctttaactggtgatgagccaatgtgagatatcagacgagaacaaatatcaagatcgacatcacctggaaggatgtataaattctcaggcatcttcgagttaacagtatgtgctcgaacgaagtaagaggattcatttcctaaacgagataacggagatttactgaatcgttctttgatatagccagctatagtcacattcctatcacgaaggtagtttaggttttcttcaccagtaccattgcctccaaggataatttcagaaacgtttgattgcggacaagcgtcgataaccacaacatcttggtctggatgggaaattgcgaactccactgcaaggttgtacgtcaggaaagtttttcccacgccccctttgttgttccaaactaggtattttgtattgctggcaatcatttctgttggcctatcagtagcttcaacacgtccattatccattatcgtatcctgtgtgtatttgtctatgattcagttataaaaaataacattatgaaaatgcccgtctaggcacttgatgaaggctggtaaccggaccgggaaaagagcgaaataaaatctaatttatattaactctttattttaaaagtgattatgcgccttcaccttttatcctgcggctcatgtacttcgcgtacaactcgtccagctctttcagcctcagagagaaaactctcatcatgttctgctgctcttcctcgggcaactggcgatagagctcaagcaggcgctgttcgtcaggtttaagtccgtctttctctccgacatcctcaccaagcagccacggaactgatacgccagcagcatcagcgatagctaatgcggagcttttactaattcttcctgttttgaaccaactggaaactgcttgcttgctgacaccagctaccctggccatctctgttttagagaaacccttcttatttaactctgccagcctggagatcaggccattcgtcagtgtgttatcgctcatcacctcattgtaaatgattgctttacttgtaggtaggcatgtgttgtttgacttgttggtaaaatgatgctttacttttgtcatctaaggaggtcctatgactggtattgaaaaagcaattcaaaaatttggaacaggggctgctcttggaagagcgcttggattttcaaaaatgacaatttccaactggaaaaagaccgggattccccccgatcacattcgttcagttttcgaacttacaggtgttacgccacatgagttacggcctgacttgtatccaaatccaacagatgcattaccaagccaagaggcgtcagccaaataaccatagaggatatttacccatggagaacgcaattgcacgaaagttagacccaccagaaatcaacccgattgagatagagagtgtcctgctcaaccggcttgcatcggtaggtcagaaatcatacgccgagcatatgggcatcagcgagtcgacagtcagcaggcgtaaagctgaggggtatttctgcaacatggcgaaagagctggcttttcttgggattcaggccgcgccaccggaagcggtactggtatccagaaactatctcacagctgtagagattctcgctgatgccgggctaaaggctgaacgagccaggccggatgcgctggggtgggactgaaaatggcagcaactaaaaaggcgaaagccgcggtgctcgaacaccaacggctttctggtggaattaactggatcaattcacaggagtaattatggcaaacactgccaaagtaatcaattttcctgtgcctgacgtggcacctaaggagccgcgcgtggcagatctcgatgatggctatacgcgcctggcaaatgaacttctggatgccgtgatgtgttctggtttgccggagactgagctgtgcatcctgatggccgtatggcgcaaaacgtatggatacaacaagaaaatggactggatcagcaacgagcagctagaggagatgattcagaagcatcatacccattgctcgacagcaaaaaacagtctgatcaggaagaaggtactgattcaggaaggccgcagggttggtatgaatatccatatttccgagtggcaaactaaaaataacggattctgcaaaacattagctaaacctgctaagaaaaccttagcggaagttgctaacgcacctaagcagaagttgctaaccacaaaagacaaactaacaaaagacaatattaaaagatctacgtccgagaattctgacgaatcctctgacaagccagcaaagaaacctcatgttctaaaacccgaagcagcgattcagagaggcaacaagtggggaactgctgaagacctaactgctgccgagtggatgtttgacctgataaaaaccatttctccatcagccagaaaacctaacctggcaggatgggctaacgatatacgcctgatgcgtgaatgtgacggacggacacatcgcgacatgtgcgtgctgtttcgctgggcgtgccatgacagcttctgggctggcaacgtcattagcccggcaaagctccgcgaaaagtggactcaactcgatatcaaccgcaacaagcaacagactggcacaactgcctctaagccaaaacttgacctgaataacactgactggatttacggagtggagctatgaaaaacattgctgcgcagatggttaattttgaccgtgagcagatgcgccgtattgccaacaacatgccggaacagcatgacgataaaccgcaagttgagcaggttgctaaggtcatcaacaacgtgttcagtcagcttatggccgcgttccctgctaccacggctaatcgcagccaggccgagatgaacgaaatccggcgccagtgggttctggctttccgtgagaatggcattaccaccatggaacaagtagctgccggaatgcgtgtcgcccgccgtcaggaacgtccgtttctgccatcgccgggacagtttgtagcgtggtgccgtgaggggagtggagcgctcggggtcagtgttgacgacatcatgggcgaatactggcgttggcggaagcttgttttccgttatccgaccagtgagcagttcccctggagagataaaaatccgctgtattaccacgtctgcctggagctgcgccgccggggaatggaagggcaactcagtgaaaaagaacttatccgggccgctggcgacattctgcatgagtgggaaaagcgagttcttgcaggtaaacccataccgcctgttcgtcgcgctttagccgcgccgtcacgggatcgcggtccaacgccagccgagatgttaatggcgaaatacaaacaacgcaaagacgccggtctgatttaacaggagtccgcccaatgagcaacatcgacaaacaggcgctgcgtgaagcggctgtagcaatagagacagtagcaacgccgcagaaattgcttgcgtttcgtgtgaaggttacaccgcaggttgtgctggcgctgctggatgagaatcttcagctccaacgggaaaaagacgcaatagaggccgtggcacttgcgctgcgtgatgatatgcgacaggcgcgggagcaactggaagctgcagagaagcgtattgctgaacagcgtgagtattacgagggcgttattgctgatgggagtaagcgcatagcagaactcgaacgcagcgagactcagcttatcagcgaacgcgatgacgcggaatccgccctgaacgatgcctacaaagccgttatgggccaggcaccagaatggagcaactggtttagcttcgagaatgcgatagatgaaattgagttggcgtgcgagctatggcgcaaccagacagatgacgttatccagttccgccagcgcatagtagaactggaggcgaagcttgaaactgccgacaggttgcaggatggcgcattccgtgacggcctgaaagctgggttcagctatgggcagacagatgaccaatccgggttcgcgcaatgcatgtctgcatatagcacacgcactgacattggtgtgaaggtggaatgagatggcagaaaccattttagacgtgtgctgcggctctcgcatgttctggttcaacaaacaggattcccgcgccgtgttcgccgatatccgcgccgaagaacacacattgtgcgacggtcgccgtctggttatcagtcctgacctcattgctgattttcgcgcgctaccgtttgctgattcgtcgtttccggttgtggtgtttgacccgccgcatctggaacgtgtcggacaaactgcctggatgggtaaaaaatacgggcgattgaacaaaaaaacatggcgttctgacctgcgagccgggttcaaagaggcgttccgtgtattgcggccacacggtgtactcattttcaaatggaacgaaacgcagattccggttagccaaattctggcgctgacggacgtaaaaccaattattggccagcgaaccgggaagaacgacaaaacccactggattatttttgtgaaggattaaccatgaccactattaccaaagaatggctacagcaaaccatcgctgaatttgaaaacactcgcgacgatattccgtttggcctcgacgatgacgacgccaaaattcttattgtgctgaagcgtgcgcttgcatcgctggaacgcgaacgtattcgccgcgagcacgccgagtggtcagataagacgttcggcgatgtcggtccagtaggaccactgaagcacctctcgaaagaagcattagaggccgctgccgacccatccgatccgcttgaatgggctgatatgcagtttttattgtgggatgctcaaaggcgtatgggtatttctgacgaattcattaccagggcgatgatagaaaagctggagataaataagtctcgccagtggcctgagccgaaagacggcgagccacgactgcatattaaagagcagtcagcgccggtaattccggatggttggataagctgtagtgagcggatgccggatgaaatcgggcgctattggtgctatgtcgaagaacaaaatgacctcgggaaaagccattaccagtggaactgctcatggaatggcgataaatggggcggtgaaatgatgtctggaaaagtaacccactggatgccgctaccagaaccgccgcaggagtttaaccgtggctaacctgcaacttgccgtcaaaggtgaatacttcgatgccatgattcgcggagagaaaacggaagagtatcgcctgtgtaatgactactggaataagcgaattatgttcagggagtatgaccgcctgattatcacaaagggatatccgaagcgcgacgattccagccgtagaattgacgtcccgtatggtggctatgaagtgaaaacaataacgcatccgcactttggtgatgaaccggtaaaggtgtacgcgataaaggtgaatatcaattgctaaattagtagcatagcataaagatgcttgcattaatgaagtgtgaataataacgcttcatcaatagtaagctactgaaatggcaaaaacaccatattaaagaggattcaaaaattgaaaatgttcatgcaaatagacagacgcatagatgttaatggtaattcatacttagttagatgcgaagagaggcctaacggtgagtggcgtgtatatgatattgaccgtaaggtcaatatcagcaccatgaacaaagacactgcctttgatgaatggaaagctgaagctaaaaaacaacataattcgtagaattacaaaaaccccaaaccatagttgttaagtattatagatccatccttgtcaggccaaagatatcgcaacttaaaaaaatcccatcaattcaacccacccattgctggggattcctcggtaacgggcgggttttaccgcctaaaatctgatatgaaacaacatgctagcttttgcaaaaagtgctattcaccccttgaatattctttctaacaggtatactgtgtttatatacagtggttgaatgtagagggaattatgagaattgaacttgttatcagccggacaaaacagcttccggaaggtgccgttcctgcacttgaaaaagaattaattacccgtctccagaatcagtatgaaaactgcaacttaaccatccgtcgaggcagtcaggatggtctgagtatcgtcggtgctgctgatggcgataaaaaacgtatacagagcattctgcaggaaacgtgggaaagcgctgacgactggttttattaacattgcgcttaatgctggcgcgcatttttcagaataccgcaatttgcgtatccctttgatgctgctgccgacaatttttaaccgcgtctgtacatcgcctgaagggagaacaaaaattgagtaattcagctttgcaaaaatcagaagatagctggtatgacattgtaagaagatctgatggctgcgtagtgtttagctttccatcatcaggcaggcatcttatctatcgtgtaaatggcatggtatctatgcgtcctttgctggatgatgaagaagtttttactcccaacggttttatgcattttattcgccgtctcggctaccgggtaacaccaccttctgataatatgaaatcaacggcctgaacaaccgttaaccttctgcgccacggagaataccatggcgcacgaattacaactcatcaagcagtcatctggaattctgatccccgcaacgccggagagtggggatttcctgcgctcagtaaaaatcggtgagtggatacacgccgattttaagcgtgtccgcaactacgcctttcataaacgcttttttaaactccttcagcttggtttcgactactggacgccaactggcggcacggtcacatcgcgggaacagaaacttatctccggattcgttaattttctttgcggctccgcaggccaggaatataccccggcccttaacgaggcggcggaacagtacctccataacgtagctaccctgcgaaccggggacgtcgcccttcttaaatcttttgatgccttccgggaatgggtaaccgttcaggccgggttttataccgagcatttttatccggatggcagccgcgggcgccgggcgaaatccatagcgttcgccagtatggacgaaaccgagtttcaacaggtctataaggctgtgctgaacgtcctgtggaactggattctgtttcgtaaattttcctctccggaagaagttgaaaacgtggccgcgcatctgctggagttcgcatgaaaatgacatggtttcagcatccggcgtgtaccaccgaagaggcggatgagctggtgaagcagtaccgacgcaggggggtaaagacggagcgtagtctgaatcatgactgcattcactggacggtaagcgccctgttaccggagttcgatcatgtgccagaacggaggcgtaaatgctcttatctgaaataaaaacttaccgcagtaaaaaatggctggcagccgtcgggcagattgaacagtgcgtgttgtgcgggcggtggggaacgcaggttgcacatcgcaatgaattaaagggcatgggaatgaaaacggatgactgcgccacggcggctatttgtcaggaatgccatcatgaaatcgataacggcagtcacctgagcagggaagagcgccggtgtctgatgaacagggcgatcgtactgacagtgattaaacttgtacgaatgggaaaggtggtaccgaaatgatttatccagccagtaccggaaaaccgggcgaatattttcgactgaatacactggaaagcgtgtggattcagggaaaactccgtatgtggggacgatggtcatacatcggcagcggtaaacccggcaatatgtttaaccagttgctggcctccagaaaactgacaaaaacagccatcaatgaggctttacgccgtctgaaaaaatcaggaacaagcaagccagagctggaggcctttcttcgggaaatgatgaacgggaaacaaaaaagctggctggcgcattgtactgattccgaagcaatgttgattgaccgcgtcattggtactgtattagctgagtatccggcgctgaaaaagttgattcaccagcgttacgaagggtgtggagtgagtcagagaaggatggctgagttactaaacgaacaatatccagactggtgttatgcaacgtgccgcaatcgcataggtgtatggctaaaaatggcggaatttatgctttatctgccgatgcgtgaagcgtttgcaaccgatgcccacaaaattgcccgttgactctgtttgttatccggggctatattcccgccacgccagcaaaatctggcgtcgggattggtctcccggattactactcaacgcataccgcgttaagcggttttttttatgcgctaagcacggctacattcgcgatttatggtgggctgtgtgagggcttcttaggaagcgccgggtttgagtagccggtaagaccaaccttgcacagttcaccacccgtcgattggtctcggcagtggtgatggttaacctcatgaggtgatactatgactactcaaattaatgcagataacctttcccctattactcataaccagatccctgtcataaccactgaactgttagcgcagctttatggaactgaaacaaacaatattaaagtaaatttcagtcgaaattcagatcgttttgtctgcgggaaacattacttcaagattgaaggagatgaacttcgcgctatgaagcacgaggttactcacagtaactctgtgaaaattgcccgcaacgttcgatctctcatcctctggacagaacgcggagcagctcgccacgcaaaaatgctcgaaaccgatcaggcatgggaggtattcgagaagctggaggattgctacttcagccaaaagaatccttcagtgcgagtttcacgccagaaaagttacgacacgcgagttctctgttatcagcaaagcggcgtcactgtttccacaatcccgttgcgggatgatgacattgtcatttcccttgagtcatggctggaactggcgagagccaacggttggtttgttattcgcaaagatcaactggtggaaaaactgatgcagctttagcaaaaaagttattgcatttttagccacaaactgcttcaattccggtatgcttcgcaaagctgtatcgcgaggcgaataacagacatgaacacaaaaagaacccgccattgagcgggtttttgcgttttaggggttcgcattcgcgggccttttttgttcaacaggctttgaattgtggtttcttgcaccgtggtattttctgcttcgccctatactatttgcttagtcttgcggaggtgtgaatgaaagaagggtattactggattcagcataacggtgttgttcaggtggcatactatacgaacgacacagttgatgatctggaatcaggacggcttattgtcggtgtctggcatctgacaaggggcgatgatatctgccataacggtgaagcagaagtactgtcggggccgttacaaccaccagcttagatataaacgcgctggcggcgcttggaagacggcttgaaatattagctgcgtaaatcatatccctgattgtctgtataccactgccgcatagcggggatcggctcccgcattctttcacataaaagagccctgctgcggtttaaggagatgatgatgaaaattggtaagcacgcacataatgtaaatacttcgtctgcattggctcccagaacaagatttgtcttttcaacttctggggtaaataaagaggaagtcattgaaaagttaaaggtcgtcattgaaaaaattagcaacgaggaggtatctcttgatcctcatattcatctggagtcctacatatcaggcgtgaacatatcctgctctcccgcctgattagaggcgtgctattcttctaccatgctgccaacttgaattggaagagggacgatatactcccagaatggattcatggaagatattccagaccagtaccatattgctttcgtgaaaaccattgcggcattatctgatgatgcgttcaggtcaagtaaccgcatatcgccatgatgaacattggtatcctcattgataagaatttcataaattggttgcggaccttcctgttctcggtatttctttctaaaagaatctgcgtcttctattgatttacaagcgaatattgactggtatcgtgatggcttctcaggaaattgcatctggcgtaccagttcaacaataagctccataaggtcatcaccattaagttccctccttgggaaaagatatcgcagcccatgctcggagattttgaagttaaatttcgcgccaataaagctatcaatggcgtaggtgtcagttacaggtggctgcatggaagaaaaatccattaatgcatttgcgttgtaccggcctcttctgtcggcggaataaagcactatgctcatttaattctccatatttggtgtggttacttttggcgatttaacaatatcaaatgcagggtatacaccgccagacgtcatctggcacttattcacaggctgcgctattgcgtggccttttttatttccacttacccgacatccgggtagtccatttcccggacaggggaagttatgacaatggataaacatacaacatggctggcctacatctgggcattaatcagcggcatatgcgcccagtggacgttaaacgactatggcgcgctgataggtattgttctgggtattggtacgtttctggttaataagcattacaaaaaaaaatcagagcaggctcaggcaaggcaggctgccgcgatggaagaacgtaacaggctaatcgcccggattctggaaaaaaacgaccatgacagcatgttaaaaatgctggcggtatctgaaatgccggagggcaatgatggcgttaaggacaaaagttaaatacggtctttccgccgctatgctggcactgattgccgccggtgccagcgcaccgcagctactcgaccagtttttacaggagcgggaaggaaatatgctggtggccgttcgtgataacggcggcgtctggtcagtatgccgtggcgtgacccgtatcgatggtaaacccgttgtgaaaggtcagcgactgacacaaagccagtgcgaccattacaacgccatcgagcgggataaagcgctggcgtgggtcaataaaaatatccatgttccactgaccgggccgcagaaagtggggatcgccagtttctgcccgtacaacattgggccgggtaaatgtctgccctccacgttctacagaaagctgaacgcaggagatcgtaagggagcgtgtgcagaaatccgccgttgggtatatgacggcggcaaagactgccacaacagggaaaatcagtgttacggccaggtgatacgacgcgaccaggaatcggcgctggcgtgctggggtattgaacaataaattgttgtcagcggaataattcaccaaaaaatgacatggcgccacaggggcggataacacaaaatctgccgatttctgatttacgaaggatataaaagcgaaaaccccgattgctgcaaacagtcggggttttctgtttctgcaccttgatgaaggcaagggagaacctgtgattgatattagcaaactgattagggagttgcgactaatgattgagcaattaccaaactggaaatttatcctgatctggctggtactgtttgtcgctgctattggctatcttgtagggcaaatccgttggtggtgacatgaaccgcataactactggcgtaatagtctcattgcttatattggccgccgcgctgggctggactaccagtcactatcacggtaacgccgtgaagtacaaagaccagcgtgataccgttactcacaacctgaagatggctaacgagactatcagcgatatgcaaacgcgccagcgtgacgttgccgccctcgatgcaaaatacacaaaggaactagctgatgcacaaaacaggaatactgatttgcagcgccgccttgctgctggtagccgggtgcgtgtcgaaggaagctgtacagtgccaaccacaaccaaaaccgccagtacccgccgcgtgggcaatgctgccaccgtcgaactctctccagttgctggacaaaacgttctcgatatccgcgccggaatcatcagcgatcaggaaaaactgaagtatttgcaggagtacatccggacgcagtgcaaataaaaaattcccgcaggacggttacggttccggcctgcagggtgtcataaagagcacaaaatgtcttataaggggatatacggacatatgtcgcatactatggtactgaagaaaaagacctcatgtatcaacgcagcgtaaccagacgctaaaaactggtacacctcatgaaataacccagtggctgaaaagcttggtgttggagcgaatcccctgaccaggctggcatttattttatctgaatattgacgctgtattttttcgctttgtttttacgggcttcattacgtgtctgaagtactctcagttcgtattttccggacgccggtagcgtgtactggccattgtcatccagttcagatgaatatctggacaggtcaacggaatcgctaattcctggcccgaacaggtaggtatctgcgccttcattcgaaatacttacatgtactttctgcccctttctggcctggaagttatatgtatcgtaatcgtatccctttattacgccggaatagcgggcgctattttgtcctttatcgaattcgacattcacgtttttaccagtcgcaaagccagctgaggttagcagtgcaaaaagaaaaacagttttagcgatactcttgaatttcatatttaagaccctcagtcagcgttaaaatgattaattgttatattataacaataagtgttcggttttttccagggtcctttccgggaattctgcctgttacggggcggcagcgtcgcaggatttcactccttatgaaaattttcagagaaaagccagatccgttcttcttattgtttatttcctgtttttaaaggtttttttagaaaaaagaaaggatctgctggataacgtttttagttaaaaacgaagatcgcagatcctttcctgtttccgggagacttttccatgaacgtgaacaaaaaaaaactggctgaaatttttggttgtgacgtcagaactgtcacagcctggcaaagccaggggctgccacttgtttccggaggaggaaaaggtaacgaagcagtgttcgacaccgcggcagcgatttcatggtacgcggagcgtgatgcgtctattgaaaatgaaaagctgcgtaaagaggttgatgatttacgtgccgctgcggaatcagatcttaatcccggcaccatcgactatgagcgctaccgcctgacaaaagcccaggcggatgcgcaggaacttaaaaatgctgagcgcgaagggctggttcttgagaccgaactgttcacctacatcctgcaacgggtggctcaggaaatagcagggatactgtcaagggtaccgctggtattacagcgcaaatatcctgatctgtgccagtcgcacatcgatgtggtcagaacggaaatcgccagggcgtcaggcagggccgccacgatagcggatgtggagaagtggaccgatgatttccggagagcgcagggcgaataatgccaacagagccataactaacgggctgatagcgcttcatattcccgtaccgcttaccaccgtgcagtgggctgatgagtattactatctgccaaaagagtcctcctacacccccggcaaatgggaaacgctgccgtttcaggtagcgataatgaacgcgatggggtatgaactgatccgcgttgtaaacctcattaagtctgcccgcgtgggctataccaaaatgttgctgggggtggaaggctatttcatagagcacaagtcgcgcaacagcctgctgttccagccgaccgactcatccgctgaggattttatgaaatcccacgtggagccgactatcagggatgttcctgtattgctggagctggccccctggttcgggcgtaaacatcgtgataacacgcttaccctgaaacgcttttcttccggtgtcgggttctggtgcctcggcggtgcagcagccaaaaactaccgtgaaaaatcggtggatgtggtctgctatgacgaattgtcatcttttgagccggatgtcgagaaagaaggttcgccgacgctgctgggggataaacgtattgaaggttctgtctggcctaaatccattcggggctccacaccaaaagtcaaagggtcatgccagattgaaaaggcggcaaatgaatcggcgcattttatgcgttttcatgtaccgtgtccgcattgtggcgaagaacagtaccttaaattcggtgatggcagtacgccgttcggtctgaaatgggagaaaagcaagccggagacggtgtattacctttgtgaacataatggatgcgtgatccgtcaatcggaacttgatcagaaagcaggccgctggatttgcgataacacaggcatgtggacacgcgatggactggcttatttcagcgcgtccggtgaggaggttccgccgccacgatccattacctttcatatctggacggcttacagtccctttaccacctggatacagattatttatgactggctggatgcgctgaaagatccaaatggtgtgaaaacctttataaacaccacgttgggcgagccttatgaagaggcggtggccgaaaaactcagccatgagcttttgctggaaaaagtgattcattatgcggcgccggttccggagcgggtggtgtatctgaccgctggtatcgactcccagcgtaaccgttatgaaatgtatgtctggggctgggcgccgggcgaagaggctttccttattgataagcaaattatcatgggacggcatgatgatgaagataccctgcagcgtgtggatgccgtcattaataaaaaatatcgtcatgctgacgggacggatatttccatttcccgtatctgctgggatatcggcggtatcgatgcagaaatcgtctataaacgctcaaaaaaacacggcattttccgcgtgctgcctgtcaaaggggcctccgtttacggaaaacccgttattaccatgcctaaaaaacgcaaccagagcggggtattcctgtgcgaaatcggtactgatactgccaaagaaatgctttacgccagaatgggggcggttactgcgcctgccgacgaagccacgccttatgcgatccgctttccggataatccggatgtttttacggaggtggaagcgaagcaactggtagccgaagagctggtggagaaactggttaacggaaaattccggctgttatgggatgccaaaggacgtcgtaacgaagcgctggattgtcttgtctatgccagtgcagcgttacgggtgtctgtgcagcgctggcaactggatctggaggcgctggcgacatcaaggaaaagcgaagagcaggataccccgacacttgaacaactggccgcaatgctggcaggaggagttaatggcaacaatcactgagctacaggaagcccgcgtcgcgctgcatgacctgatgacgggaaaacgggtggcgacggttcagaaagacgggcgacgggttgaatttaccgcgacatcggtaggggatctgaaaaaatatgtcgcggaacttgaggcgtcactgtgcaatggtcgccgccgggcacctgtgggggtgagactgtgaagcgcaccccggttctggtggatgttcacggcacgccgctgcgggaaagtctgggatacaccggcggggggatcggtttcggcggacagatggctgactggatgcccccggcggaaagcgtggatgccgcgctgctgccttcgttgcgcctcggcaatgcgcgggctgatgatctggtccgtaataatggtattgcagcaaatgcggtggcgctgcacaaggatcatattgtcggacacctgtttcttatcagctatcgtccaaactggcgctatcttggtatgcgtgagagcgcagcgaagagttttgtggatgaggttgaagctgcatggacagaatattgcgatggtatttttggcgaaatggatgccgaggggaagcgtacttttacagagttcatccgtgaaggcgtgggcgttcacgcctttaatggtgaaatttttctccagcctgtctgggacgctgaaaccacgcaggttttccgtacccgattcaaggctgtcagtccgaaacgggtggacacgccggggtatgcccgcggaaaccgccagcttcgcgcaggagtggaaacggaccggaatggaaaagccctcgcctatcatgtctgtgatgatgactggccggtggctggtggggaacgctggacccgtattcctcgttttctgccgtccggacgacccgcgatgttacatattttcgagccggttgaggacggacagacgcgcggtgccaatcagttttacagtgtgatggagcggctgaagatgcttgataccctgcaggcaacgcagcttcagtccgcgattgtcaaagccatgtacgccgccacgatagaaagcgaactcgattccgagaaagcctttgaatacatcacggcggcagataacaaagatacgcctcttgttaacatgctggcaaattatgcccgctattacagtaccaacagtatcaaactgggcggtgtaaaaattccccacctgtacccgggtgatgagctgaatctgcagactgcgcaggattccgataatggcttttcagcgctggagcaggcgctgctccggtatattgccgccgggctgggggtctcttatgagcagctttcgcgtgattattctcaggtcagctattccagcgcccgcgcatctgccaatgagtcctggtgctatttcctggggcggcgccggttcattgccggacggctggcgacacaaatgttttcctgctggctggaggaggcgctgatacggggagttatccgggcaccccgggccaggttttccttctgggaggcccgatccagctggagccgctcggagtggattggtgccggacgtatggcgattgacggactcaaggaggttcaggaatccgtgatgcgtattgaggccgggctgagtacctatgaaaaagaactcgccattatgggcgaggattaccaggagatattccgccagcaggtcagggaatccgaagaacggcgggcagccggactttcgcgtccggtatggatcaccgatacctatcaacaacagatcgcggcgagccgtcagacggaggaggaaaagcgtgcaacgtaatctcccgcacatcatcagccaggcaaccagtgctccgttgctgcttgaacccgcctatgcgcgggttttcttttgcgcgctgggcagggagtcaggcattaacagcctgcacattcccggtaataacgaaagtctggatcagtcggatatggcactggtcacaggcgattttatggcgaccggaaagccgcaggcacgtttttatcaggtagtgaacggtattgcggtattacccgtgaccggaacactggttcataaactcggcggaatgcgtcccttttcagggatgaccggctatgacggtatcactgcccggctacaacaggcggtttcagatccggaggtaaaaggcattctgctggatattgacagtccaggcggtcaggctgccggggcgtttgactgtgctgacatgatttgccggatgcgcgaacagaaacctgtctgggcactggcaaatgaaacagcctgttcggcggccatgttgctggcggcagcctgttcgcaccgtcttgtgacccagacgtccagaatgggatcaattggtgtggtgatggcgcataccagctacgccgaaaaactgaaacaggaagggatcgatatcacccttatctattctggcgcacacaaggctgatctgacgcccagccagaaattaccggaaagcgtccatgccgactaccagcagcgaatggacgaggccagaaagatgtttgcagaaaaagtggcccggtacacggggttgtctgtcgatgcggtaatggcgacggaggcggcagtgtatgacgggcaggccattatcactaccggactggcagatggaatggtgaatgctgctgacgccatcggcgtgatggcagaagctatcaacagtaacaagacaggaggcactatgcctgaattaagtgcagctgacgctgtcacgcaggaaaaccagcgcgtaatgggaattctgggttgcccggaggccagggggcatgaggcactggcacagatgctggccgggcagccgggaatgagcgttgctcaggcgaagtctattctggctgccgccgcgccggcggatacgaccagcaccgctgaccgtatccttgccctggaagaagctggtggtcgggaaacactcgcacagacactggcggccatgccggagatgacggtggaacaggccagaaccattctggcagcatcgccgatcgctgcggcaacgtcacttcatgatgccgtgatggcgcttgatgaggcgaaaggccgtgaagagttggcggaaaaactggctgtcatgcctggtatgaccacagatcaggcccgtgacctgctggctgccgcgccggacaaatccggtaatgcggggctgagcatgaacaacgcatttgatgctttcatgcagtctcattccccgggccccatatccggcggtaaagaccacagtaatgataccgaaacgacgttgttgatgagtattcccggtacttcagccacctgataaggagacagcatgtcatttaccaccactattgagaaacgtgcggataaccgcattttcgccggtaacgatccggcacataccgcaacgggagtcagcgggataacggcggccacaccgatgctgacgcccctgatgctggatgataccaccgggaaactggtggcctgggacgggcagaaggccggaacggcggtcggggttctggcccttgagctggacgggtcggaaaacctgctgacgtactggaagagcggcacctttgccacagaatcactggcatggccgaagagtgtggatgccattaagcaggcaaatgcattcgccggaagcgccgtcagtcacgccgctttaccgtaataagaaggccgcgaagcggcctttatcgtatttaacgtccggaggacaccatttatgggattgtttaccacccgccagttgctgggttataccgagcagaaagttaaatttaacccactcttcctgagcctgttttttcgccgtactgtgacatttcctacccaggaagtcatgctggacaaaattaccggaaaaacaccgattgccgcttatgtatctccggtggttggagggaaggttctgcgtaaccgcggcggggaaacgcgcgtactgcgtccggggtatgtcaaaccgaagcatgaagttaactatgcgcaggttgttgagcgtctgccgggtgaagacccggccaggcttaacgatccggcctaccgtcgtctgcgcattctgaccgataacctgaagcaggaagagaaggccatcgtccaggtggaggagatgcaggccgtcagtgcggtgctgaacgggaaatacaccatgcagggcgagcagtttgacaccgtggaggtggattttggtcgctccgccgggaataacattattcaggccacaggtaaaaaatggtcagagcaggacagggaaacctttgacccgacttatgatctggatatgtactgcgaccaggcatccggtctgatcaatattgccgtgatggacgggaaagtctggcgtctgctgaacggttttaagctgttccgtgaaaaactggatacacgccgcggttcaaattctcagctggaaacggcggtgaaggaccttggggctgtggtgtcgttcaaggggtattacggagatttggccattgtggtggctaaaacatcctatgttgctgataacgggaccgaaaagcgttacctgcctgaagggactctggttctgggaaatacggcggcagaaggtatccgctgctatggtgccattcaggattcacaggcgctcgcggagggtattgttgccgccacccgttatcccaaacactggctgacggtgggggacccggcgaatgaatataccatgacgcagtctgcgccgctgatggtcctgccggacccggatgagtttgtcattgtcactgtcggttaagcatcccaaaaggcctgattcaggcctttattgttacaaattgcgggaggatcttttatggcaacaaaagaagagaatatacagcgtctgcgggagcttgcgacgcggcttggtcgtgctccggatgtgtccgggagcgccgctgaactcagccagcgtgtcatggaatgggaagaggaagcggaggcggaggcggagcatttgcctgctgtggaaaatgacagtgatgaatccatagtgccgcccgggatcgggcaaagatccgaacgggtacttatcagggcgcatcgtacactacacatctgcgccatcgatccggacagtaaccgggaactggatatggttatggcgggaaacccggcgcgtatttcgcaacacgatgtggacgagctgattgctgcaggacttattattgaactgtaagggtggcgatatgtcgcagtccgaaaacctgtttgataccgcgatttctcaggctgatgatgccatcctccgggtgatgggaacggtagcaacaataacctccggcgttctggcaggggccacgcttacgggcgtatttgacgatcctgaaagtgtgtcgtatgccgccggaggtgtccggattgagggggacaagcctacattttttgtcaaaacatccctgacagtccatctgaagcgcccggacacactaaccattctcggtgacaccttctgggtggatcgcatcactccggctggtggagacagcagtattattctgctgggcagggggacgccgccgacggataaccggcgcaggacgggaggaatgtttgactgctccccggcctaaaggccggggtttcccggaggcattctgatgaaagggcttgaaaatgcgatccggaatctgaacagccttgaccgacagatggttccccgggccagtatctgggctgtgaatcgcgtggcgcagaaagctgtttcagtggcaacccgtaaggtggcgcgggagactgtcgccggagataaccaggtaagaggacttccgctgaagctggttcgccagagggtgaggttatttaaagccggtacagacggtaaacgctctgcccggatacggattaaccggggaaaccttcccgccataaagttgggcgctgcacaggtcaggatgagcaaacggaggggcaaactgctgtatcgcggaagtgtgcttaaaatcgggccatatctgttccgggatgcctttattcagcaactggctaacggacgctggcatgttatgcgacgcgttaacgggaaaaaccgttatccaatcgatgtagtgaaaattcctctttccggaccattgactcaggcattcgaaagcgccacacaaagcttgattgacgaggaaatgccgaagcaactggggtatgccctgaaacaacaactgaggctttatctttcacgttgactgctccccgccctgaaggacggggattcccacttcaacgagccgaatctaagccgctttgagcgattcaggatttacaggctctccgtgggctaacactgccagcccggcagctttgatattacgtgccgcgttaacgtcccggtcgtggtcagttccgcactcagggcactgccatttacgaacatcaagaggcatttttttcatggtgaaaccgcaacagctacagcgttttgaggacgggaaaaactggtcaatggctaccactgaccgccccgcccattcgcctttgtaccggagctggcgcacaagttcgccccagctcgcgtctgctattgctttggatagcgacgggttgcggatcatgttcctcactttcagggattcgacacatacaacttggttatcgttaatcagtttgcgggatgccttgtgcagggcatccagtcggcaatcagcaattttcgcgtggagtcgggccacctttaaacgggctttggcgcggttctttgagcctttggcctttttgcttaaccggcgctggagtagtgccaggcgagccgcgtatttagcggtatggcggggattgccggacctgaatccggtatcggtgacgaacaaatcttttaaaccaacatcaatgccgaccattgaagaggtgatcggcagtgatgcgggttcaaattcgcaaaggcacgaaacaaagtaccgccctgcggcatctttggaaatggtgacggtagacggcacggacggcagcggacgactccagcgcacgtctaaggggattttgttctttgccatgtacagcttgccgtcgcggtatttaaacgcgctcgcagtgaactcagccgcctgcttgtgccgtttgcttttgaaagccggatatgcagcccgtccggcgaagaagttagcaaaggcggtttgttggtggcgcaaagactgctggaggggaacgcaggaaacgtcgttaagccaggcaaattctggctcctttttcagcgccgtaaggcgagcgttggcctgtaggtaaccgatcttttcctttcgctcgtagtacgcatcggtacgccagcggaggatggagttgtagacgaaacgcacacaaccgaacgtctgagctaaaagctcagcctgctcagtcgtggggtaaaaccggtatttatatgcgcgtttcatggcttcacatattaaagaggaaaatgtgattatgcaaaagacagttagccggaaaaccgcctcctttcctccccggccttcaggccggggaggaaaggaggcattctgatgagcaaacacacattaatccgccgggccgttctggaaaagctggaatccgtgactggcgcacctgtcactctttttgatggacttcctgctttcgtagaacaggaagatttacccgcaatagctgtctggctgacagacgcacagtatacaggccttatgaccgatgaggatgactggcaggctactctccatacggcagtttttctgagggctcaggctcctgatacagagcttgatatctggatggaagaaaaaatctttcctgcgctggaagaggttagtggtctggagcgccttatcgataccatgaccccgctgggttatgactaccagcgtgacagcgaaatggcaacgtgggggatggcagaaattacttaccggatcacctataccaactgaggaggatatgatgggaacaccaaacccactggtaaaaacgaaaggcgccggaaccacattctggctgtataccggcagcggcgatgcgtttaaaaatccactggctgatgatgactggctgcgactggcaggtattaaggatctgcagcccggagaaatgagtgcagatgcggaagacgatgactatcttgatgatgaaaatgccgactggaaaagcactacgcaggggcagaaaagcgtcggtgacaccacggccacgctggcctggaaacccggtgagaccggacagaaaaaactggttgagctgtttgacaccggcgaagttcgcgccttccgtatcaggtatcctaacgggacggttgatgtgttccgcggctggctgagttcactgggtaaaaccgtgacgtccaaagaggtgatgacacgcagcgtaaaaatcaccggcgtcgggcgtccttctcttgcggaggaggatacacctgacgtagtcagcgtatccggcgtgaccgttgcgccggccagtgccacggtggctgccggagccaccaccacgctgacatttacggtaaaacctgataacgcgtcagataaaacgctgcaggttgcgaccgccgatccgctgatcgccaccgtcacgctgaaggataatgtggccacggttaaaggcgtgaaggcgggcagcgtgaatattgttggtatcagcagtgacggcagtcttgtcgcggtggcagcagtgacagtgacggcgtcataaccctctcttatcagtccgccccggttccggggcttctatggaaaatcatcatgtttctcaatacagacacctttaactacggtgggcattccatcgtgctcagtgagctttctgccctgcaacgtgtggattatctgaagtttattcagcagcggacggcagactatgacgcacagcctgaaaccctgacggaagcagagcgtcagacagaatttatgcagatgggggtggatattaatgcatggctggtatcccgctccctgtgtgaaagcaaaaaagaggaggaggcccgcgccctgtatgagtccgtcagactggaatggtcttatgaggcgctgggacgtggcgctgatatggttctgtccctgagtggtatgcgtcttccggcatcgcaggaagacgacagcgggagtgaaaaggacacgaccacgccggaaaagtcctgaaccgggagctggcgtttgtgatgcggctcgcgcgtgagttccggcgaccagactggcggcagatgctggcggaaatgagtgcgacagagctgggtgagtgggcggagcatttcgggaagaacagcttcagtgacatgttgctggatgcggagtttgcaacgctgaaatcgctgatttccggactggttacaggcacgcatcacgatgcagaaatgttcagcctgatcactgatcctgagtcgttgcacgaaaaaacggatgatgaactgatgatcctgggcgaaggtattaccggaggtgtccgctatggaccagatagcgaacctggtcattgatttaagtatcgacagcgcagagttccgaaacgaagttccgcgcattaaaaaattgctgaacgatgcggctggtgactcagaacgttcagcggcccggatgcagcgttttctggataagcagacggaggcgacgcgccggacgtccgccagtctggagcaagtgactgccagcagtaccgcgtacagttccgctgtggagaaaagcgcagcggccagtacgcgtctggcggcggatgtggatcagacgcgacagcgggtggaggcactgggaaggaaactgcgtgaggaacaggcgcagtcagcggctgtggcggcagcacaggacaggacaagtgctgctttttaccgccagattgacagtgtaaaacagttaagcggtggtctgcaggagctgcagcgtatccaggcgcaggtacgacaggcgaaaggacgcggagatatctcacagggcgattatctggcgctggtgtctgaaaccgccaggaagacccgtgagcttaccgatgccgaagcgctggccacgcagaaaaaagcacagtttatacgccgcctgaaagagcagacgacggtacagggcctctcccgtaccgagctgctgcgggtgaaggcggctgaactgggtgtcagtagcgccgcagatatttatatccgtaaactggagcgtaccggaactgccacccatacgctaggactgaaaagcgctgctgcccgtcgtgaactgggcgtgctggctggtgagctggcccgtgggaatttcggggcactgcggggaagtggtatcacgctcgctaaccgcgccgggtggatcgagcaactgatgtctccgaagggcatgatgctcggcgggctggctggcggcgtggctgctgctgtttacgggctgggcaaggcctactatgaaggcgctaaggaaagcgagacgttcaataaacagcttattctgaccgggagttatgccggaaaaaccacaggccagcttaatgcgatggcgaagtcgctcgccggaaatggcgtcacgcagcacgatgctgcaggcgtgctggcacaggtggtcggtagcggagcgtttaccgggcaggcaatggcaatggtatcccgtaccgcgaccagaatgcaggaaaacgtgggacaatcagtggatgaaaccatccgccagtttaaacgcctgcgggatgatccggtgaatgcggcgaaagaactggacaggacactgcattttctgacagccacccagcttgaacaaatcagggtactgggcgagcagggaagagtggctgatgccgcgaaaattgccatgtccgcgtattcggaagaaatgaataagcggatgggggacgtacacgacaatctgggctggattgaaagagcatggaatgctgtcggtgatgcggcgaagtgggcatgggatcggatgctggatatcgggcgggaagacacgctcgatgaaaagatcgcgacactgcaggaaaaaatcgcgcgcgacagaaaaacgccctggacggtgtcttcttcccagactgaatacgatcagcagcagctgaacgaacttcaggaacagaaacgccagaaggacctgctggatgcgaaggcgcaggcagagcgtaattatcaggaaacgcagaaacgtcggaacgagcagaacgccgcgctgaaccgggataatgaaactgaatccctgcggcaccaacgggaggtggcgcgcattaccgccatgcagtatgccgatgctgctgtacgcaatgccgcactggagcgcgaaaatgaacgtcataaaaaggcgttgtcacaacaggcgaaaaagccaaagacttaccacaacgacgaggccaggcgactgcttttgcagtacagccagcaacaggcgcagactgaagggcagattaccgccgcgaagctttccacgaccgaaaaaatgacggaagcgcataagcagcttttgtcatttcagcagcgcatcgctgatttgtccggtaaaaaactgacggcggatgaacaaagcgtactggcacataaggatgaaattgcgcttgcgctacagaagctggatatctcacaacaggatttgcaacaccagaatgcccttaatgaactgaagaaaaagacgctcacattgaccagccagctcgctgacgaagaatcccgcgtcaggcaacagcacgcaatggcgctggccacaatgggtatgggcgatcagcaacgtggccgatacgaagagcgtctgaaaattcagcagcactaccaggaacaactggagcagcttaaacgcgacagcaaggcaaaagggacatacggttctgacgaatatcgtcaggcggagcaggcgctgaagggcagtctcgatcgccggctggctgagtgggcggattacaatgcgaaagttgacgctgcgcagggagactggacgctgggggcgtcgcgggcgctggataactttctggcgcagggcggcaatgtggcaggcatgacggagaacgttttcacaaacgcatttaacggcatggcggacagtatcgcgaattttgccgtgaccggaaagggcagtttccggagcctgacggtctccatcctggctgaccttgcaaaaatggaggcacgtattgcggcttctaaactgttgggttcagtgctggcaatgttcggctttggcacatcggcaggcggcagtacaccatcaggggcatacagttctgcggcgctgtcggttattccgaatgcggacggcggcgtgtaccgttcggcaggactcagccagtacagcggcagcattgttaatcgcccgacattttttgcttttgccaaaggtgccggggtgatgggcgaggcaggaccggaggcaatattaccacttcgtcgtggtgctgacggtaagctgggtgtcgtggcagccggttcaggagggatggcgatgtttgcgcctgagtacaacattgaaatccacaacgacgccggcaacggacagattggtccgcaggcattacaggccgtatataacattggaaaaaaagccgccattgatttctggcaacagcagtcgcgtgacgggggtattgctggaggagggcgataacaatggaaacatttaactggaagatccgccctgatatgacagtggaatcagaaccaaaagtcacctccataaaactgggtgacgggtatgaacaacggcgtccagccgggctgaacaaccatctggcgaagtataacgtaacggtccggattcgtaagggagaacatcagaaccttgaggcatttttatcccgccacggtggagtgaaatcctttctctggacgccgccttatacctggacacaaattcgggtgatttgccgcaaatggtcgattaacgttggctctctttgggtgactgtgaccacgacttttgaacaggttgttatctgaggaggagtgatgcaggacatttcgcaggatacgctgaacgaatccgctaaactggcgcagtccgccaggatcactttgtgggaaatcgatctgacacagtctggcggtgatcgttattttttttgtaacgaggcaaatgaaaagggggaggcggttacctggcagggacggaaatatgacgtttatcctgtagacggttgcggatttgaaatgaacggcaaaggcgcagctgcgcgcccgtcactgaaggtatccaatctttacggtatggtgaccggaatggtggaggatttgcatagcctggttggggcgacggtcatccgcaggatagtatatgcccggtttctcgatgccgtgaattttcaaaacggcaaccaggaggctgacccggagcaggaatccgtaagccgatgggtgatcgagcagtgcagtgatctgacggcggtaagtgcgacatttgtcctggcaacaccgactgaaacggacggatgtgtcttccccgggcgaattatgctggccaatacctgtacatggatataccgctctgacgaatgcggttatacgggaccagctgtcgcagatgaatttgataaccctaccgccgatccggcaaaagatgcctgcagccgctgcgcccggggatgcgccctgcgtaacaataccggaaactttggcggtttcctctccattaataaactttcacagtaaatcatcatgaaagaacaggatattctggcgcacgcccgacggtgtgcgcctgcggagtcgtgcggcttcgtggtgagaacacaggcgggagaacggtatctcccctgtgtgaatatttctgccgcgccggaggattatttccgtatggcgccggaggactggctgagggctgaaacgcagggggatattgtggcgctggttcacagccatcctggcggccagccgtatctgagcgatgtggaccgcaggctgcaggttcaaagcgacctgccgtggtggctggtatgcgccggccaggtacataaattccgctgtgtgccacacctgaccggacggcattataaacatggggtttttgactgttacacgctgttccgtgatgcctatcatctggcggggattgatatgccggattttcaccgggacgacgactggtggcggcatggtgacaatctctatctggataatctggagacgacggggttttaccgtgtcagcgcagccagtgcgcagcccggcgacgtgttgatttgctgctttggctcctccgttccgaaccacgcagcgatttactgcggcgacggagagctgctgcaccatattcctgaacaactgagtaaacgtgagaggtataccgacaaatggcaacgacgcacgcactccatctggcgacaccgggcatggcgcgcatctgcctttacggggatctgcaacgattttgccgccgcgtcagcctgcaggtagccagtggtgctgaagctgtccgggcactggcggtacagttgcccggtctccggcagaaactgaacgacggctggtatcaggtacgcatagccggagacgatgttacggctgataccctgacaaccagcctgcatgacccgctgccgcctggcgcggtgattcatattgtgccgcgtctgggcggggccaaatctggcggggtgtttcaggcggtgcttggtgcggcgctgattgccgttgcctggtggaacccggcaggctggctgggagcggcggcggtatccggtatgtatatgaccggggcgtcgatggttctgggcggtgtggcgcagatgctggcaccaaaacctaaaatgtccgaaatgaggcagaccgataacggcaggcagaacacgtatttctcgtcgctggataatatggttgccaacggtaacacgttgccggtgctgtacggcgagatgcaggtggggtcacgcgtgatttcccaggaagtcagtaccgctgatgaaggagatggtggtcaggttgtggtgattggccgctgacaacagaacagattcagacagaaccgcctccgggcggttttgtcgttttacggggtaataaatgggaaagggcggcggaaaagggcatacgccccgcgaggcaccggataaccttaaatccacgcagctgctgagcgtcatcgatgccatcagcgagggaccgatagaaggcccggtgaacggtctgcaaagtgttctggtaaaccagacgccggtggtggaccgcgacggtaacacgaatatccacggcgtgaaggtggtataccgcgtcggtgagcaggaacagaccccgctggagggatttgaatcgtccggcgccgagacggtgcttggtgtacaggtcaaatacgacaatccggtgaccagaaccatcacggctgcaaatattgaccgcctgcgttttacgttcggcgtgcagtcactggtggaggccaacagcaagggcgaccgcaatccgacatcggtcaggctgcaaatccatcttgagcgctatggtcagtgggtggtggaaaaagagattacgattaccgggaaaacaaccacacagtatctggcctcggtgatagtggataatctccctccccggccatttggtatccggatggtacgtgtgacggcagacagtaccactgaccagttacagaacaacacggtctggtcgtcgtataccgagattattgatgtccggcagcgctatcccaacaccgccgtaattggcctgcaggtggagtctgagcagttcggcagccagcaggtgacgcgaaattaccattttttcgggcggattattcatgtgccgtcgaattacgatccggtagcgcgaacctacagcggcatctgggacggcacgttcaagcctgcatacagcaataatccggcgtggtgtctctgggatgtgctgacacatccccgttatggcatgggacagcgaatcggcgcggcggacgtggacaggtgggcgctgtatgcaataggccagtactgcgaccagatggtccctgacggattcggcgggacagagccgcgtatgacctttaatgcgtatctggcacagcagcgtaaggcgtgggatgtgctgaccgacttctgctccgccatgcgttgtatgccggtgtggaacgggcagatgatgaccttcgtgcaggacaggccctcggatacagtctggacctatacccgcagcaatgtggtaatgccggatgagggcacaccgttccgttacagcttcagtgcgcggaaggaccgccataatgcggtagaggtgaactggatcgaccctgataatggctggcagacatccacggaactggtggaagacacggtcgccatcagtcactacggacgcaatctggtaaaaatggatgcgtttggctgtaccagtcgcgggcaggcgcaccgcgccgggctgtggctgataaaaacggagctgctggaaacccagacggttgattttagtgtgggtgcggaggggctgcgccacgttcccggtgatgtgattgaggtttgcgacgaggattatgccggcatcagcctgggcgggcggattctgtccgttgaccgcgcccgccgcattctgacccttgacagggagattaccctgccgtcgtccggcaccacgctgataagcctgatggatggcgaaggcttgccggtcagcgtggacgtgcagtctgttaccgacggtgtgcaggttcaggtcagccggataccggacggcgtggcggaatacagcgtctgggggctgaaactgccgtcgctgcgccagcgtctcttccggtgtgtggctgtccgggaaaacgacgacggaacgtatgccatcaccgccgtacagcatgtgccggaaaaagagtccatcgtggacaacggggcatcattcgatccgcaacccggaacgattcacggcaccgttcccccggcgatacagcatctgaccacagaaattctggcggaggagggacagtatcaggtactggcgcgctgggacacaccgcgagtcgttaagggcgcctcgttttctttgcgcctgaacgtggcggcggaagatggcagtgaccggctggtaagcagcgcaggaacgccggatacgcagtaccggttccgggggctgacgccggggcgctacaccctgtccgtcagggcggtgaacagccagggacaacagggagacccggccagcacacagttcagcatctccgcgccggcggcaccatcatttatcgaactcacccctggctatttccagattacagccacaccgcgtcaggcggtatacgacccgacggtgcagtatgagttctggttttcagacgcgcagattacggatatccatcaggtggaaaacgccgcacgatatctgggaacggcgctgtactggatagcggccagtgtgaatatcaggcccggcagggattactatttttatatccgggcggtaaatcaggtcggtaaatccgcattcgtggaggcgaccgggcaggccagcaacgatgccgcaggctatctggattttttcaaagggcagataactgaaagtcacctgggtaaggaactgctggagaaggtggaactgacggaggataacgccagcaaactgcagcagttttcgaaggagtggcaggatgctaacgataaatggaacgccatgtggggcgtcaaaatagagcagaccaaagacggcaaatattatgtggccggacttggactgagcatggaagacacgcctgacgggaagataagccagttcctggtggcggcggatcgcattgcttatattaacccggcaaacggaaacgagacgcccggattcgtcatgcagggcgaccagataatcatgaatgaggcgttcctgaaatatctgagcgcgccgaccattaccagtggcgggaatcctccggcattttccctgacgccggatggaaagctgactgcgaaaaatgcggatatcagcgggcatatcaacgctgtatctggctcgtttacgggagaaatcaatgccacctccggtaagttttctggcgtgatagaagcaagagagtttgtcggtgatatctgcggctcaaaagtcatgcagggcgtgaacatcagggcgacgaacgacgaacgcagcacctcaacacggtataccgacagcgccacctatcagatagggaaaaccatcacggtgatggctaactgtgagcgtaacggtggctccggtgccatcaccgtcacgataaatattaacggccaggtgaaaacggcggaggttatcccgtataccgcagggcttccggccatgtatcagaccgttgtcttttcggtctacaccacttcacctgtcgtggatatcagcgtttctctgagggttcgtgggcagtacaccacgtctgcttccgtctggccgctggtgatggtttcccggtcggggaacaacttcacaaactgaccggatttccggtctctttcgtttaacaaggaacagatatgactatgtcgcgcgtaatttcgctggcggcagggctttccctgtccgttttattttccactgctgccgttgccgataacggaagaggaagcggcaacagcaatattgaaaaccagacccggatttataccggcaccgaccgtgggcagaaacagcaccgcgaggcaaagggaaaaacaatcacgcggagcgtccagtgttctctgccggcatatttacgtgacccggataatcagtgctgagatgtgaatgaatctgaagcctgcctgcgggcgggcttttttatggaggcaatatgccagtacttatttccggcgtactgaaggatggtacgggaacgccggtacagaactgcaccattcagctgaaggcctgccggaccagtacgacggtggtcgtgaatacggtggcatcagaaaatccggatgacgccgggcgctacagcatggatgtggagcaggggcagtacactgtcacgctcctggtggacgggtatcccccgtcacatgccggagttattacggtttacgatgattcaaagccgggcaccctgaatgattttctgggggccatgacagaagacgacgtccgcccggaggcgctgcggcgttttgaggcgatggtggaagaagttgcccgccaggcatcggaggcatcgcggaatgccaccgccgcagggcaggcatctgaacaggcgcagacatcagcaggtcaggcatcggaaagcgccacggcagcagtgaatgcagccggagcggcagaagcatcagccacacaggcagcctcatccgcagcatctgcggagagcagcgcaggtacggcgaccacaaaagccggggaggcatcagccagcgcggcgtcggctgacacagccagaacggcggcagccgcatcggcagccgcagcgaaaacatctgaagcgaatgcagatgcctcccgtactgccgccggcgattcagctgctgccgcagccgccagcgcgacggcggcgcagacatcagcagagcgcgccggagcatccgaaaccgccgcgaagacgtcagaaacgcaggcggcttccagtgccggtgatgcaggtgcgtcagccactgcggcggcagcgtcggaaaaggcggcagccgcatcggcagccgcagcgaaaacatctgagacaaatgcagcaacgtcagcaagtacagcagcggccagcgcaacagccgcctcgtcatcagcatcggaggcatccactcacgccgccgcatctgataccagcgcatcactggcggcgcaaagcagtactgctgccggagcagcagccaccagagcagaagatgccgcaaaacgggcagaagacatcgcggacgtgatttccctggaagatgccagcctgacgaaaaaaggtatcgttaagttaagcagtgccacggacagtgacagcgaagcgctggcagccacaccaaaggcggtaaaaaccgttataggtgaggtgcaggctaaagccccgctggacagtccggcactgactggtacgccaacagcaccaactccggaaaccacagctgcaggtattgaaattgccacggcagcgtttgtggctgcgaaagtagcacagttggttggttctgcgccggaaacgctggacacgctgaaagaactggctgacgcgctgggtaacgatccgaactttgccaccactgtactgaataaactggcgggcaagcagccgctggacgatacactgacggcgctgtcaggaaaaagcgttgacggtcttatcgaatacgttggtttacgggaaaccataaatcacgccgccgatgcattactaaaatcacagaacggtggcgatattccggaaaagccgctgtttgtacaaaatatcggagcgctccctgcatcaggtacggctgttgcagcgaacagactggcatcacgcggcgcgcttccggcactgactggtacgacaagaggcagcgatagtggcctgataatgggcgaggtttacaacaatggctatccgacgcaatacggaaatattttacgtctgaccggagccggtgatggggaaatcctcattggctggagcgggacaaacggtgcgccagcgcccgcatatattcgcagtcatcgagataccgccgatgctgagtggtccgaatgggcaatgctctacaccacactaaacccacctccggattcgcatccagtaggggcggcgattgcatggccgtctgatgtgctcccggatggtggttatgcttttatgtatgggcagtccttcgataaatctgcttacccgttactggctatagcgtatccgtccggcgttatccctgacatgagaggctggacaataaagggtaagcccatcagtggacgtgccgtattgtcgcaagaaatggacggcaataaatcgcactcgcacaccgcgcgggcgcaggatactgacttaggggcaaaatctacctcatcctttgattacggcacgaaatcgaccaataccacgggcaatcatactcaccagttcggcggttatatcaattcatactggggagattccaatcacacctcatttcagcctggaggtggtgcatggacacaggccgctggcgaccatgcacatacagtttatatcggaggacatgagcacaccatgtatatcggtccacacggacacgtcgttattgtggacgcagacggtaatgcggaaaccacggttaaaaatattgcatttaactacatagtgaggctggcataatgacttttaaaatgagcgaacaggcgcagacaattaaaatttttaatcttcgttcagatacaaacgaatttattggcgcaggtgatgcatatatcccgccgcacacgggattaccggcaaactgtactgatctcgcccctcctgatattccctccagtcatatagctgtttttgacgctgaaacccaaacgtggagtctgcaggaggatcaccgcggcgagacggtttacgacacaacaaccggcaatcaggtttatatctccgagcctggtccgttgcccgaaaatgtcacatcagtttcaccagttggtgaataccagaaatgggatggtaaggctaaggtctgggtaaaagacgaagcggctgaaaaagcagcgcagcttcgtcaggcggaagaaaccaaaaacaggctcctgcaaatagcatctgaaaaaatcgcgccgttacaggatgcagtggatctggacgaagcaaccgataaagaaaaagcttctcttctggcatggagaaagtaccgggtacaggtaaaccgtgttgatactttaaagcctgtctggccggagaaaccagccagtagtttataatttgtcaggaaagctcaggccttatttatagcaaatatgaagaaggcctgtctgtcataactgatatggttactggttagtatatataaatttatactcaataacctctacacattttaaaccaatcttcggggaagggcacgtccgcaggccaaagactacacatcttaggtggtatgggcttaattgtttctgctttttgctgatcttgggagtctgccgctattgtaagagcagaatatagtgaggatggtaatattaaagccattgctaaaaatacgctcttaacgtgtttcataatatgttacctgttaaattgtggcacactatccttacggttacagcatcctttactatagatattaaacgttattcattaccatcaggtgagtaaataaaaaccatttataaaatatttaacttaaataaaaatgataagcactattatattttatttcccatgtaaattaattcatatgaaagtgagttcatgtgctcttcaaatcctggctggctcgctccccggaggaacaggccagttaacattatcaggagtgtttgttatatcaatcaacttcacttcatttttgtaagccagccacactgacagttttgatcctgtccgcgtattgtggacacagccttaagcgaggttctggttttcaaattgctccggactgagatcgccgcagaccctgacggcgcaggctggacgctatcgtttttacattgtacctcaggccccaggttcacttcctcagcaagccggggcgcaccgtagcgctgttttgcctggctgaaggcctctcttacgacattgtcgcagtcctgccggaactgctggtgggtattaacgactgtgcgccttgtttgccaatgccgattccgaactcattctgacgccgatcatcattgccgtgttgctcgcgcctggtttcagcaaaagcaccacgctggctatactgcatttctttttccgcagggagaagtgagtaaatgagtatggaaatggagctttccctataatggtggctgaagctaatcatgtgtcatgtattgcaaatgtcaaagtgataaataaagtttcaacagtctgtgttttttgtgaaaacaactcgctatggtgctaaccctatatgagggactgattgaacatcagatatatcccggcttatttaatactgtttactatgagggtaataatatgttttctcttattaaatgtattagtcgcgacttgatctgacatatggccttgaaaggttgagagttaccggttttgatatgggtgtcgaatccttatacaaaacacgaggtaactctcatgcttcatactaccaatcccgtcatcaaacacaaagccggtttgctcaatctggctgaagagctcagcaacgtgtcgaaagcctgtaaaatcatgggcgtctcgcgcgatacgttttaccgttatcgtgaactggccgatgaaggcggcgttgatgcgctgataaatcgtagtcgccgcgtacctaaccttaagaaccgtaccgatgaggcaactgagcaagctgttgttgattatgccgttgcgttcccggcccatggtcagcaccgaactgcgcaaacaggacgtttttatctccggtagtgatgtccattccgtctggctgcgccacaaccttgagaacttcaaaaaacgcctgaaagcgctggaagaaaaagtggcccgcgatggcattgaactgactgccagatcgccgcgctggagcgtaaagccagtgatgatgaagcctgtggtgagattgaaaccgttcatccgggatatctggggtcacaggacacgttctacgtgggcaacctgaaaggcgttgggcgaatctatcagcagacgttcgttgatacatactcgaaggtggctcactgcaagcgctatatcaccaaaacgccgattacagcggctgatttgctgaatgatcgtgtactgccgttttatgagtctcagggcctgccgatgctaaggatactgacagacaggggtacagaatattgcggcaaagtggaacatcatgattatcagctttatctggagataaatgacatcgaacacacgaaaacgaaggcgatgtccccgcagaccaatggcatctgcgagcggttccataaaacgatactgaacgaattttatcaggtgacgttccgcaaaaagttatatggcgattttgatacattacaatcggatcttgatgaatggctggttcactataataatgagcgaacccatcagggaaaaatgtgctgtggccggacgccgatggaaacgttacttgatggaaaacgcatctggtctgagaagaatttaagccagatgtaatctgacagatacctgtataaataaccggtaactgtcagatcaggtctgagctaatacaactaattgtatgttatttgtcgtttattgctaaatatatatcgttaattgaaggcttgatgcgtgtgtctgcgttaatctcttttcattgtgctgtaaattaggcagtggaatatgtttaatatccgcaatacacaaccttctgtaagtatgcaggctattgctggtgcagcggcaccagaggcatctccggaagaaattgtatgggaaaaaattcaggtttttttcccgcaggaaaattacgaagaagcgcaacagtgtctcgctgaactttgccatccggcccggggaatgttgcctgatcatatcagcagccagtttgcgcgtttaaaagcgcttaccttccccgcgtgggaggagaatattcagtgtaacagggatggtataaatcagttttgtattctggatgcaggcagcaaggagatattgtcaatcactcttgatgatgccgggaactataccgtgaattgtcaggggtacagtgaagcacatgacttcatcatggacacagaaccgggagaggaatgcacagaattcgcggagggggcatccgggacatccctccgccctgccacaacggtttcacagaaggcagcagagtatgatgctgtctggtcaaaatgggaaagggatgcaccagcaggagagtcacccggccgcgcagcagtggtacaggaaatgcgtgattgcctgaataacggcaatccagtgcttaacgtgggagcgtcaggtcttaccaccttaccagaccgtttaccaccgcatattacaacactggttattcctgataataatctgaccagcctgccggagttgccggaaggactacgggagctggaggtctctggtaacctacaactgaccagcctgccatcgctgccgcagggactacagaagctgtgggcctataataattggctggccagcctgccgacgttgccgccaggactaggggatctggcggtctctaataaccagctgaccagcctgccggagatgccgccagcactacgggagctgagggtctctggtaacaacctgaccagcctgccggcgctgccgtcaggactacagaagctgtgggcctataataatcggctgaccagcctgccggagatgtcgccaggactacaggagctggatgtctctcataaccagctgacccgcctgccgcaaagcctcacgggtctgtcttcagcggcacgcgtatatctggacgggaatccactgtctgtacgcactctgcaggctctgcgggacatcattggccattcaggcatcaggatacacttcgatatggcggggccttccgtcccccgggaagcccgggcactgcacctggcggtcgctgactggctgacgtctgcacgggagggggaagcggcccaggcagacagatggcaggcgttcggactggaagataacgccgccgccttcagcctggtcctggacagactgcgtgagacggaaaacttcaaaaaagacgcgggctttaaggcacagatatcatcctggctgacacaactggctgaagatgctgcgctgagagcaaaaacctttgccatggcaacagaggcaacatcaacctgcgaggaccgggtcacacatgccctgcaccagatgaataacgtacaactggtacataatgcagaaaaaggggaatacgacaacaatctccaggggctggtttccacggggcgtgagatgttccgcctggcaacactggaacagattgcccgggaaaaagccggaacactggctttagtcgatgacgttgaggtctatctggcgttccagaataagctgaaggaatcacttgagctgaccagcgtgacgtcagaaatgcgtttctttgacgtttccggcgtgacggtttcagaccttcaggctgcggagcttcaggtgaaaaccgctgaaaacagcgggttcagtaaatggatactgcagtgggggccgttacacagcgtgctggaacgcaaagtgccggaacgctttaacgcgcttcgtgaaaagcaaatatcggattatgaagacacgtaccggaagctgtatgacgaagtgctgaaatcgtccgggctggtcgacgataccgatgcagaacgtactatcggagtaagtgcgatggatagtgcgaaaaaagaatttctggatggcctgcgcgctcttgtggatgaggtgctgggtagctatctgacagcccggtggcgtcttaactgagcacgatattcaccgcaccaggcgaatgtggtgcggtgaacaaagatattcctggacaaacaacatcagacagcactgatgatgcacaggtgaaacaggggagacttcttcagtcagggcgtagcgcaactcaaccttttcgacgataacgcgccgcgcgccgatagtgcgaagttgatggaagtactggaccatcttaatgcaaaagacgggaaggggacgctgtacttcgccgggtaggggatgtcgcaacagtgggctatgaagcgagaaatgctttcacctcggtatacgaccagattttccgatctgccaatagtcaggtaacgggtttgatcagctcttccccttgatttttcacattgccaacggcgcgcttcacggcgtgccaggtaaatttatctgtcggcacggcaccatcagtaattatctcctctacctccttcccgcttatgccctggcgcatccattttcgcgcggtgccaggtgacagaacgagaggacgacggtcgtgaatgtctaccagacctttatcagctgcggaggtaacaatcaggaatccctctgcgtcatcgccgcgctcaaacggtgtactgccaatggcagccatgaatatcggcttcccgtcctttctgtgaatgaaatacggctgtttcttgtcgccttccttcttccactcaaaccaaccatcagcaaacacgatagctcggccatgttgccatagcggtttaaacattctgctggtggccgcagtctcaacccgtgcattaatcagcggtggtttatcccaccatccgggcgcaaatccccagaataccggatccagatgcagttgctcgtcgcgttcactgagcagcagaactttggtaccgggcgccacgttgtaccggcctataggttcagggtcataagcgatatcgcgctcggcttcatcggccagatatgccaggtattcttcgcgggtctgtgcttgtgcaaagcgtccacacatatgaaacctccagtcggtcagactgaaagtatagaagaggatatgcgagtggctgttccggtgtttcttcgagcgacctcaaccaatgtagaagcttcactattgggggttgccactagtagcatcatgttgaatgtactggcgtgaaaaaattggaatcttgaagaaaactcttccccaaaactataatcaacgttttgataatcaatgagttgtaaaagacagttactggatttttttgatagtaggaagaatgataatttcaactttatcaaatggttgatatgtttttggcaatgtaatgctgcgccacatgcagtggttcgaagccgcagacctgattgttaaaggtatggaaggcgcgattgccgcgaagaccgtgacctatgactttgaacgcctgatggaaggcgctaagctgctgaaatgtagtgagtttggtgacgcgattatcgcgaatatgtaataacgataattgttaaaaacaaaaacggggacttaacgtccccgtttttattattagtattcgaacggttatcaaaactttatcaaaactccctcaattcagaccgcaatagtagttcatcctttaccccgatcgtcatgataacctgagacccccctgaaagctgatagttaccgattttgattgtagtggttttcttaataatgtgtgatttggctattttttgaaagtgccttaccagatttattgttattatcaggagaattttttaataaaaagtgatggtttattgactacaatagtgggtaggttaagtattttataaaattattagcatgctttatttgctcttctacaaggctgctaagaagtgttgaaatatcagcctgataaagaatacgtcagcgaaagtgaatgctatattagtcataaaaattcaggagacatatgctcaaacctatctgccatagtggaagtataaaggttccggaatatctggaaacagataaggaaaaaaatgccggacgtactccactgtcttcagacattcagcaagttagaaatgttgttgaagatgttccgctatttccagaaagcagaacggcgagaggttctgtaagcgcagcgtacaggctttcttttgacgaagtgttttgcggtctcagcaatgaagagcgtaaaaaggtgtatggtcgcctttttggaaaacaagtacttgcgcatattcattccaggtgtcagcgcgacgctgacataataagagaaaaagcgctcaggcggataagccgtgagtgtggtgccgaaatagattgcgctctcttactaaataagatggtggatattttacaaaatgcccggctgacaataaattttaatgcagcaaaaattgactttgtctctctcttaaaaaataaagaatatctgaactcttatgcattaggttgcagaccgggagatttacctgcttataatgtcgggcgtgattcagttgaaactaaagcatttgaactggagaagcttgcagattcaccttatgccccatatggtcagacaggcggtttttccgtagcatatactcccaacagtagaacttttagcactacaagcagaccaatttatgctgcactggactttctgaacggtgaaaatggaggtgccagcgcctatgggaaatcattttttgaattaaatgataatgtaaaaacaaactgtacattctcaccttttgatatctacggccacagatttggcctggatacgagtaaattatctacattttggcatatggagaacctgattgcatcctgtcaaaatgatttttttggttataattgctttaagagtttggttaaaatggctaaggacgaaaaatttttagctcattctaattatggtaaaggctatgaagggaattatatagaggctcatattcatggtgatgtatgtttattcagagatataaaacacgtttatttgtctttgcaagaaaactcttactcgaaaagtcaactatatgattatgcaaaacaaataaaccaggcgcttaatagagactgcataatattatattgacaagcttattatcagtctctttaaaagagctttaaatgatcatgagcgcatacttcttgaggtaggcagtaactgcttttatatttattatctcaggaccgttctggcagatacctgtgtggcactttagtgtggtctggcaaaatagaggaatatggaccagcagaagcgcctgctggctgcttttcacttaaaatgctggacttcaccggtgcttcagatgaagcgaccttcacagtcatcaagtggcctgtattaccacaggagtgatttactggctatcgatattcctgctcatatcaatgacagtatttcgctctttcccgtacattgctctcccgaccagctcacggtccagtacatgacagtccttttccacttcgctacgcctaattttttttagttgctctgttttattgcgctgaatttgtacctcaaaacaataattttaaatacttatttgaatattttttttatgattttttcaagaaatgagtaaaaaaaatgaagaatgatataaataattaatgcaataaaaaatgatatcacaccaattgatggtcctgttttgtatacgaataacatgcataaaaatatagcaaatagatcaagggaaatatccgcgatgaaatcagtaattattttgaaaaaattcttcatattacctctttaaaatatctattttattcatcatttttaggtcgggcagtgctcgaaattcttacgtacaacgtatacgctccggtttctgcgcgctgcccggcttcacactggctccaacaagtacgcccgctggaatagattcctggcgtcacataacttcacctggttatccacaaaagactcaataaataaacatcttgagtacgaaaaattacagtgtcagagaatgaaatagcgattcgctgtcttcaagcagtgccttagtacctggcacgcgctctttcgcgctataatttttatcaatgtttgtatcgcctgctattttttaaatgtctgctgtatttcgttcatctttccagctgcttttttacgctgactttcaatgtcttttctcgattgttcaacaagttgctgtgctttttcggcttctttttttggggcgaaaggttctttgatctcatatccggcaatagaaccatccttatttaaggtcattaccgcacgtgctgtatttttagcagtgatggtaatgtcatagacgaattcgccattatgagctatctctgctcgtacaacgatatcgctatcttccgtaacggaaatgatgccactggcgttagcgcgtttaattgtttcctgaatacgctctggtataatgctgaaattgatcgagtcgaatttgaataaagcctcttttagtgcttcttgtttttgctcctctgttatagtgccaaagatggttaaattgacaggcgaaggtcccccccagtagccgttgttaaatttaaacacctctactttagcaggggtgttaacgctttgtcgaatgaatgaatacccgcccttgaagaaacggacttcaataatcgcaagattggctccaccttttgcgttgatattggcaatagctttttgcatttcggctttgtcgtaaaagaacattgattgctggtgctctttttgctggattttttgcatgtatttctcttgatttttttcagcttccgccatggcatctttatcgttatcacaggcgctaattagagttgccgcgatgaaggtaatcggaagtaagagatttttatatgtaacatgtattttattcatgtgaagtatttccctttttatataaaatagatagtcttgactggtcgagactatcctggaaacatagtaataatgcgtgtgcatatctgcagtaagttttagttatgctggttttatttcggatttttacctgttactttttgttcgtaaataggtattttacgtattgatgataagtttagaacctatcccagtaggcgtaatcgttaaagccagtttggcgaataaaagagtctaatgggataggctcttaataaacaacaaaaccaaacgtactttcagatttcaggctggaatgcgcacagctgattgttgataagggctactcataccgacaggccagtgaagcgatgaatgtcggttccacataccggtctgaggtatcaacaacaacatgttctgagtggtagcgtttgcgttatatcgtcacagacagcgcctcagggcgctgttttcgatcggacatgtcgctttcgcaggaggggacgttattcggcgaccagccacatatcagcctcttcaaacatctcttccagcatacggtgcagccgttctttctcggtttttgtacagtcactgtttaatgcgttcgcctgcattggcttaactttcacttgcgcatcgggaaaaagttgatgtacgcgttttgtgagttcattgaggatgatttcgcgtgcgcctggcaaaccttcaacatttcgcttgtcataaacgagttcgacgaacatcgccatttcctttttactggttggatgaccagtatttaagctgggtatataactggtgtcaaggtttagccgccgttttgtcatcctgacgttgcggacgtaaagtaaattgatcgcacgtggaagtaaaggtcgctaacctgttgtcgtgtcaagaggttagcggcactctcttcacagcggtgtcctgctacctgatggtaaattccagggcgcgactaaaatcgcaatcggccaacacaacagggtcgccttttctgacaataatgctatttgtgcccaggcattttcggctctgtttccccttaattttgttatcatcagtgagccagcgctggttatcattacccgtgcatgaataaagaatgattggtgtgccttcttttgtaccttgtcctgcggcatccagacatttctcaccctgcgtgattctgtctcggtgaaatgagaaaagctgagattgcacatgcttacactcccgcagcgtcaaacgattctgttgatctgggcctgcatcaaggcacagaccatcagttgtccgaatttgttccgcgtcatttatgtaataaccaccggaattaatctggttttgtgtaatgaccgggaacgacaaattaatactataaggtgtgggtaagccgttcgtcgtacatccacataaaatagaggagaggcagagaaccagtgtggtttttcctgaaagcaaagtcattcaattattaccctaaaaataaatagcgttacaactatattggcgatttatacccactgaatatgacgtagcattgagcggcaatagagataattccgatagaatcacataaatacttcggttaaatgcgcgcagccagccactcctgtgacaatgggtatatagcgttaaatacttttgcaatattagatgctatcacagtgaaaaacggctgtacatttcttcacgttaaacaaagtgagaagggggggcacccgatatatgataaaagaggtcacaggagtcattagcaaaataaatcttttagattttcgccactgaaaacattctgcagcctttcaggcaaagcctcatagcaggctgcggaggtagacgtactcgctaaatttttctgaaaaaatgccgggtgacgaattatgaaagataaacgttggcggcggtaggtccgcggaggccattaatacgacaaaactcaacgcgtataccggggataagcgcttctgtttcgtgttggcgacatgctgaaatgtggacctgaacatctttgcgtccatcggagggggtgatgagacctttaccgctcttacaatcaaaggttttgacaattcctgtcattttacgagacaaacaaattccttaatggggataacgaggcgcactatacacgtcaggaaaaataatgccagctatatttgatggcaatcaagatttccgggtggctaaaagtagtcgttcggcaccattgtagataaataacattatgttctggagaaagtattccctttcctggcgtcattgactggtgcggacatcatgggttttgtcgtcgggcaggacggtgaactaatctgcctggcttgctttttatcagtatttgtaggtggttgcggggttttactaccaaaatcgtagataaaaatatcccatgatgcctgttgtaaaccagaacaatggcctgaactggccaaaacatggaatgaaaaaataagtaatgaccaaagcataaaagcatgatgtttcatagcacctcctgttatatataatgacttgtgaagttcatctcctgaattatggaacgtcattgacattttttattcaacgaagagttaaccactcttaataataatgggttttatagcgaaatagacttttttatcgcgtgttcaatatttgcgttagttattatttttttggaatgtaaattctctctaaacacaggtgatatttatgttggaattgtggtgttgattctattcttataatataacaagaaatgttgtaactgatagatatattaaaagattaaatcggagcgggaataaagcgtgctaagcatcatcgtgaatatgattacagcgcctgcgatggcatataaccgtattgcggatggagcgtcacgtgaggactgtgaagcacaatgcgatatgttctgattatatggcgagtttgcttaatgacatgtttttagccgaacggtgtcaagtttcttaatgtggttgtgagattttctctttaaatatcaaaatgttgcatgggtgatttgttgttctatagtggctaaacactttatggtttctgttaaatatatatgcgtgagaaaaattagcattcaaatctataaaagttagatgacattgtagaaccggttacctaaatgagcgatagagtgcttcggtagtaaaaatatctttcaggaagtaaacacatcaggagcgatagcggtgaattattcgtggttttgtcgattcggcatagtggcgataactgaatgccggatcggtactgcaggtgtttaaacacaccgtaaataataagtagtattaaggagttgttatgaaaaatattattttatccactttagttattactacaagcgttttggttgtaaatgttgcacaggccgatactaacgccttttccgtggggtatgcacaaagtaaagttcaggatttcaaaaatatccgaggggtaaatgtgaaataccgttatgaggatgactctccggtaagttttatttcctcgctaagttacttatatggagacagacaggcttccgggtctgttgagcctgaaggtattcattaccatgacaagtttgaggtgaagtacggttctttaatggttgggccagcctatcgattgtctgacaatttttcgttatacgcgctggcgggtgtcggcacggtaaaggcgacatttaaagaacattccactcaggatggcgattctttttctaacaaaatttcctcaaggaaaacgggatttgcctggggcgcgggtgtacagatgaatccgctggagaatatcgtcgtcgatgttgggtatgaaggaagcaacatctcctctacaaaaataaacggcttcaacgtcggggttggataccgtttctgaaaagcataagctatgcggaaggttcgccttccgcaccgccagtcaataaaacagggcttctttaccagtgacacgtacctgcctgtcttttctctcttcgtcatactctcttcgtcatagtgacgctgtacataacatctcactagcataagcacagataaaggattgtggtaagcaatcaaggttgctcaggtaggtgataagcaggaaggaaaatctggtgtaaataacgccagatctcacaagattcactctgaaaaattttcctggaattaatcacaatgtcatcaagattttgtgaccgccttcgcatattgtacctgccgctgaacgactactgaaaagtagcaaggtatgtattttatccaggagagcaccttttttgcgcctggcagaagtccccagccgccactagctcagctggatagagcatcaacctcctaagttgatggtgcgaggttcgaggcctcggtggcggtccaatgtggttatcgtataatgttattacctcagtgtcaggctgatgatgtgggttcgactcccactgaccacttcagttttgaataagtattgtctcgcaaccctgttacagaataatttcatttattacgtgacaagatagtcatttataaaaaatgcacaaaaatgttattgtcttttattacttgtgagttgtagatttttcttatgcggtgaatccccctttgcggcggggcgtccagtcaaatagttaatgttcctcgcgaaccatattgactgtggtatggttcaccgggaggcacccggcaccgcaattttttataaaatgaaattcacaccctatggttcagagcggtgtctttttacatcaggtgggcaagcataatgcaggttaacttgaaagatacgatcaatagcagaaaccagtgatttcgtttatggcctggggatttaaccgcgccagagcgtatgcaagaccctggcgcggttggccggtgatcgttcaatagtgcgaatatgaatggttaccagccgctgcgaattctacctgggtcacttaataaagcaaaacatttaaacgctcaacaacgacaattcagacagttcgaacttttctttaaaaataggattaaccatgcttaaaagtggttactaattagccattatactacggtagtgattcacatattctttaacgttacgttacaggaaggttgaagtggaaatgcctgatgagtcttcaggcatttcttaaggttagttagctaaggaacagttactgagaacaggtttatcatcaccttccaccagttcagccgttttgcctttggtataaagtttataagtataatttttgtctatggcttcgtaatttgctccggaggccattttcattaaccgcatcgggatcatctcgtttacctgactgataatcgcataggcgtttccagcctcggtgttgacgtaaatcacctccataacctggttatcattacaggtgtatatagatttagaaatctcctgcgaagctgctatagaggtggtactggcgctaagcgcagcgagaaagagggtaaatgggatcaatttacgtttcatcattagtatcctttgtgcataaaattgtcgttaattccctgaagaacgggagataaagcggcatcaatacgatgaatgctgtagtattcctgtttactgacgaaaagtgcgccagaaaagcgtattataatttatccatcactgacatatgtgatgagtagacaaatcttaaaatcataaactataggctgcaaatcattatggtgcgatagaaaatgattgtcaccactgctcaatactatggcataaaaaccgaagaaaacggtactgttcactgtctcgtttcatacggtatctgtcagtgaaactatttcttcaaatgatggtctttttattatcgatcagataatggcatcaacaggggttattcaggagtatatgtgaaaaagtggcttataggagggatattgatcgcaagttttctgaccggttgtctgatgtggcacaacattgataaatggtttaataaagatatcgaatttttctacgtcggagacgatagctaaaattccagtcagttggcaacgggtgtcatatcttcaggtatggcgcccggagccgccgggcgcaaattgtaggtgtataaaagtcatttcattaaaattttagcgacaacatggacagtcactaccgcgtgctaacggccctctgaagtcacaagatgaataagccagttttttgtttcagcggtgactgaaacatattttgttcctggtggtcttaccgccagttgctgaaaaagacaacgataatgtaactgttgcagagactgacgaatacgacgaccgtgaattttatttttggcgaccatatttcctcccaaaaggccgcccgaaggcggcgctgggtttgataatggagaagggcgttggtcactgccataaccaacctgtatacattaatgcaattgataatcattatcaatttggctggtggagaaaaattgtaaagatgaagggacagcggaaatggcaatgaacgggatgagactttcgttaaccacttaaattcgtgactaaaaaaaggcttttatagacttgaaaatgtttttcccgtccctatgtagtcagtggacaagcaatgcttgccttgatgttgaacttttgaatagtgattcaggaggttaatgatggcactcagaaccttgtcagcacttcccgtgtttgctgattctcttttctctgaccgtttcaaccgtattgatagacttttcagtcaattaacaggagatacgccagtcgctgcgacgccagcttacgatctgcaaaagcgcgatgcgaataactatctgcttaccgtgagcgttcctggctggaaagaggaagagcttgaaattgaaacggttggcggcaacctgaatattacgggtaaacacactgaagagacggtagaggatcagacgcactggatttatcgtggtattcgtaaggcggatttccagttgagtttttctttgcctgaacatgctaaggtgaataatgcgaaactggaacagggcctcttgttggtcgagatttaccaggagatccctgaaagcgagaaaccgaaaaaaattgccatagaaagcaaaccaaaggcgattgaacacaaatcataatcgcgttaatggaggcccgtttagacgggccttcattgtctgtagcgaaaagtatcccgtcatgcttgtaggcacagatcgctaaatattatagccctgacctctatattatcccgtgccactgacctcgtcgccattggacggcggtaagttggaattatccgcgaggtcagtccaatttttgtccactctcgacattctgcctgttatgggcgcgatatctgaacataaattcgtatagcggttcatcgttttcaccgcgttgatgctatttctgctaacactactttcatacgtaaaaaagctgatgctttttaccttatttaatcgaggcaggtatgaaattagcgctcgtcaatcggcaggtcattttaccggaaagcggaaccgagtccttccagtgccatgcctctacgcttgttcgcttaccgtgcggtacgctcgtggccgcatggttcgcggggttgcgcgaaggaagcgaagatacagccatctggctatctcgctatgaacataatatctggacaacaccgcagcgagtggcggcacgcgagggggaagcgcactggaatccggtgttattttacccgtcggataaattgtggttattttataaagtaggcagcgacgtacacgtgtggaaaacctggtttatcacctccagcgatcgaggatttacctggagtacgccagctccgttggttaacgatgatattttgccgcgcggtcccgtaaaaaataaactcctgctggcatcaaatggcgcctggattgcgccagggtcgattgaaagtcctgaacggtggagggcatttgtggatcgatcctctgacgaaggaaaacactggagtatctcttttgtaccgctggagcctgataacgctatttccgggacaaacgtagcgttgtgggatggtataaaaaaggggaggttgtgggaatgttgtctggaaaacctcctgcgctgggatggcgttattcagcctacgctgtgggagtcttctccggggcatatccatatgttgttacgaagcacacgcggggcaatttttcgcagtgattcaatcgactatggcgctacctggtctgttgcccgcgcgacatctttaccgaataataatagtggtatcgatctggttagtatgcaggacggtacgctgattcttgcgttaaatccggtcaacggcaactggggaaagcgctatccgctttcactgattgcttcccaggataatggcgaatcatggctaccgctactggacctggaaagtgaccacggtgagtattcttatcccgctattattagcgagggcggcatcgtacatatcacctacacgtggaaccggaaaaatatcgtatattgtcgattacaaacggtataaggcgctatcagtcgaaaccgatagcgctggaataataatgccttgcccggcgtgctctctcacgccgggatggccgaaatagtcatgatttaccgggtaacatccttgaaaatgtatcgtctttttgtatgtaatggtgaaacaacgccgctgctgcatgcatggcaatcaggaaatagccgatattggccagcatttcatgaatacgctttatatccgattttagggtgctatctggcgtcaaaaataccggtacagtaaaaccaaaaaagctccagcttttcccgcctgacgccatcatcgcgacgcccagcagcggtaaggcgagaaaagtgagataaagcgcgatatgcattaatttagcggctacgtgctgccagtgaggagggggaggcgtaatgaccggatccgggtatttgtgtttaagatataaccgtaaaaacatcagcgcccagaccagaacgcccatatcatagtgcgtgtctttcataaacaggtaaacgctggagccttttggcgcccacccccgtaactcaatagcagcatatgcgatgcctgtcaggagcagtgttaaccagtgaagcgttatttgcagtcttgagaaatgtgccattattattatcctttattaacaactgcttgtagagtatgcgtaaaatcttaacagaaccttaaagcgggggctgagtcgcaaggaacagacagagatagcggcacgtaaaatgggataaaaagccggcggcatcgccggcttactgttgttattgtcctcttacgacaacacaggttttaccataaaacggatatgagcctgtagtttcataatcaacactcgacactaaagaaatatcgcccgcttttttcgctgaatcaatagatgcgtcgccggtatttacaatacccaataccgtttgcgcacacgctttaccggttttggttgccgggagactcgtggcagtaattggccctttaacatccgtatataagccaatccctgtcggtgatggtcctgtagcacaccccgttaaaagagaaccaataaagataattgaaaaaatgtgttttttatttgtcatgggattagtccattataaattaatagaaaacttaccgtccgaaaatgtccggacagtcatttaaaaagtggtgtatattaaatatgcgatattactctttgcaccctcctgttgatgtcgtacctgacggacaaatatccgttgaagccggatatattccccatgccgtgtttttataacttgtgcatcctgtcagcaatgagaacagtacggctaaaaaaatcatcacgagccctggcggcgttaacatttttcggttggactccatagcatgtcatttcatcgggttgccatatgactggcgttctgctggtaagtttcattaacgcccggttcgtttaatattggtttaggtttaaagccaggaggcgctaattacgataccttcttacgtttcagtactgactaataatgttgagaaaatgaacagcgtcgggtgggaagacgcaatacagaatagaagggaaataagagaataagatggcgttaattaacccggtattcctggcgtcatttcccttgcgttttatccccgtcaaaaacggcctttagctcacgttggcgctcccgacgtttgtgcgtatgatgtttttaaaagatcgtcatactttctgttctgcgtcaattttttcattacaaatgctcgccataatgccgtcctcaggaggtctcccgacgtttatgctgcgccgggagaaacaaaaacaacgcataatctgggacaaattgatgattaaaggcaaactggcgctcgtgacgtgcgcgctgactctggtattcacttcgtcgcttttcgccgcgtcggacacggcagacggtcgtaccctgaagctggccattggccctgagccaacggaaggctttgatcctatgctgggctggagccacggcagctacttattgcttcatgcgccgttgcttaagcaaaacgccgacatgagttggggtaatttactgacggaaaaagtggataccagccccgacggtaaaatctggacgctaaccttaaagcccgggctgaaattctccgatggctcgccattaactgccgaagatgtcgtttttacatacaataaagcggcgaagagcggcggtaaaattgacatgggcaattttagccatgcgcgagcgctggacgcacgccgaattgagatgacgctgagccatccgcagagcacctttgtgaatgtactcgggtcgttagggattgttccggccagccgttatgatgaaaaaacgttcgcccgcgaaccgataggcgccggtccgtaccgactggtcagctttcagccgggtcagcaactgatcgttgaagctaatccctggtatgcgggtaaaaagaatgactttaaccggctggtttttgtctttctggatgaagataatgcttatgccgccgcgcgcagcggacagttgggactggtgcgcattgccccttctatggcggtggccccgcagcaggataatcttaaactctgggtacgcgatagcgttgaaaaccggggcattgtcttcccgatggtgccagccggtaaaaaggatgctaacgattatcctgtcggcaacgatgtgaccgctgatgtcgctatcagacgcgcaattaactatgccattaatcgtaagcaactggcggaacaggtgatggaaggccatgcgatacccgcctatagcgcggtgcagggattaccgtggcaaaatccttcagtgatattcagcgatggcgatattgcaaaagcgcgcgccatcctggaagaggctggctggaaaataaacagtgcgggcgtgcgtgaaaaagcaggtaaagaagcgcgtctgaccttatggtatgccagtggcgacagcacccgacgggatctggccgaggcggtgcgcgccatgttgcagcctttaggcattgtcgtctcgttgcaatcgggaagctgggaaactgtagagcgccatatgcacgctaaccctacgctgtttggctggggaagtctggacccgatggaactcttccatcactacagcgggaaagccgctggtgtggaatattataacccgggctattacagcaaccctgcggtagaagcacatctgaaacaggctatagatgcgcctgactggcaaaaggcgattcctttctggcagcaggttgagtgggatggaaagcagggcgcgggcgtccagggcgatgcggcatgggcatggctgcttaatattcagcatacctatctggccaacccctgtattgatctgggaaaaggcgcgccagaaatccacggtagctggtcggtgttaaacaatcttgatgactggacctggacctgtcggtgatgaaattgttcttcagtcattttttgcggctgattattctgttggtgctggtggctgccggcaccttcattttgcttagcttttcgcccgttgatcctatccgtgcttatattggcaacgatctgctccatgttccgccagaacaatatgcgcggattgcggcgcgctgggggcttgaccagccgctgtgggagcgtttcggtcactggttttggcgtctgctccagggcgacatggggtattccatgctgttcaacatgcctgtcgccagtgtgatccgggaacgttttgcgacgtcattcgcgctgctggcaggcgcctggctattgtctggtgtgctgggcgtgacattgggttttctggccggacgttttctccaccgttggccggataagatgatttgccgtatcagctacttattgtcatcgttgcccactttctggatagccatgttgttgctggcgctgtttgccgtccgctggccggtattacctgtttgttgcgcctgggaccccggaaataatgcaggaacagctcttttatcggaacgtttacgccatcttgtgttgccggtatgtgcgttaagtctgttgggcatggggcaaattgcgctgcatacgcgagaaaaaatagccagtgtaatgaagagcgaatttattcgttttgcgcgcgctcagggggataaaggatggtcgctgttacgtcaccaggtgttacgtcatgcgattaccccagcactctgtttacagtttgcttctctgggcgaactgatggggggagcgttactggcagaaaaagtctttgcgtatccggggctgggacaggccactatcgatgccggcctgcgtggcgatgtcccgctactcatggggatcgttttattctgtacactattagtgtttgccggaaatacgatttcagcctggcttgtggtggtgcttaatcgatcgctggagcgtcccgatgctctataatcctgccccgacgttgtttcgtctgctcctctccgttacctgtctgctgtttattgccggatacggttatgccacgttgagccagccgccagaggttaatctgcttgcccggcatctgtcgcctgatatccagcactggtttggcaccgataatctggggcgtgatgtatggcttcgttgctttcagggggccttcaccagtttacaaattggcgttggcgccgcgctgtgcagcggcgttatcgcgttagtgatggcggcagtggcgcgcattcatccccggctggacctcctggtgcggctgataaccgatgctatgctcgccatgccgcatttacttttgctgatccttatctgttttacgctcggcggcggtaaaagcggcgtcattgcggccgtggcgttaacgcactggccccgtctggcgctgattctgcgcgccgacgcggagcgggtagcgcagagtgactacctgacattgacctatcgtctggggcatggacacctttattgctggcgatatcactattttccggcgctattgccgcaatggttgacgggaacgttattgatgtttcctcatgcggtattgcacagcgcggcgttaagttttctggggtttgggctggcgccgcatgagccttcgctggggctgttgctggcggatgcgttacggtttattagccatggaaactggtggctggtgctatttcccggcctaatgttattcacgctggtgatgctcttcgatcagtttgcgcgcgccattcagcggctgtggctaaggagtgacgtatgctgagtttacaacaggttacgctggaaagcgcgcgttatcgctggtatggcgcgagacgctggtcgccgttattacagaatgtctcttttgatatcgcgcccggcgaaatggtggcattggttggcggcagcggggagggcaaaagtctgctgctgcaatgcctgctcgatctgctgccggaaaatttacgctttcggggggagattacgcttgatggcaaccggctggacagacataccatcaggcagcttaggggcaatacgtttagctacgtgccgcagggggtacaggcgcttaatcccatgctgaatatcagaaaacatttgaacagagcatgtcatctgaccggacgcgcctgggatgagacgcaaatggtacagctattacagcaaagcgatcttgaaccgacagtcctggaacgctttccccgccagctctccggtgggatggctaaacgaattctggcgtgccacgcctcgcttagccaggcacgttatatcctcgcggatgagatcaccgcctggcttgataccgcactggcaaaccagttgctcgagcacttgcgaggcctctgcgagcggggatgcggcgtgctgtgggtgactcatgacctgctgctggcggcgcggtatgccgatcgcattgtggcgctgcatcagggttatatcacggacaatatccgctgcgagcagttacagccggaagagatgagtgaaccgttaaaacggcaatggcaagcattgcctgaactaaacccgttatttatgccgaccggagagggaatagaatgctgagctgccgcgacctcgttattcgtcagggcgggaaagtcttatggcagaacctgacgtttacgatttctgccggtgaacgggtaggaattcatgcgccaagcggaacggggaaaacaacgttggggcgcgtcctggccggatggcaaaagccgacggcgggcgacgttctgctggacggcagcccgttacccctgcatcagtattgtccggtacagcttgtcccccagcatcctgaactgacgtttaatccctggcgaagcgccggagacgctgtacgtgatgcctggcagcctgacccggaaacgatgaggcgtttgcatgtgcagcccgagtggctgacgcgtcggccaatgcagctctcaggcggggagttggcgcgtattgcgatactgcgcgcgcttgacccacgaacgcgttttctgattgccgacgaaatgacggcgcaactcgatccgtctattcaaaaagcgatatgggtatacgtgcttgaggtgtgccgcagccgttcattagggatgttggtgattagtcatcagtctgcgctacttgatcaagtctgtacccgccatttacaggtggaatagccgcaagtcgtttctccgcattgccgtgtcgccgttaacgcaccgggaacccatgggttcccggtattgtcggcagagattttactgcatgacgcgtttatctgcgttttttgcatcagcggtattactgtagtccctggtctcttcaacctgtacaggggctctgacaaccagactaggcagcgccagttcgatatcattctcaatgagtttttcaataatacggatatttatctcttgctgaatatccatgtatttattgtaatccgcggtattgacgatatgcaccacctcataggtcagccgatcctgaccaaaggccagtagatgggcgcggtcgaattgtgtttcgccgacatcggtaataatctttttcaccatatcgccgatgaggcgtaacttttccggcggtgtcgcagtggcgacgccaaaagtaaacacgatacgacgcgtttgcatccgcttatagttgtgtatggtttgctgcaacaactgcgcgttcgcacaaacgatctgttcgccgctgaggctacggatgcgagtggttttcaaaccgatatgttcaatcgtaccggctacatcattaaagacgacgaaatcgccgatctcgaagggcttatcgaaaccaatcgatagcgaagcgaagacatcgctcagaacggtttgtaccgccagggcaatagcaataccgcccacgccgaggcttgctaccagtgcggtaatatctacgccgacgttcgccaggatggagagcagcatcatagaccagacgagcacgcgcaaaatcataccaagaatgactaacgtcaccgggtttttattggagcctggggcatacagtaaatgacgcatccatgactgtacgccctgatcaagccaaatcgccatttgaatcgcaaccactaaaaaccaggcgtgagagagggtagagaataaccggtcaggcagggcgacaaagcgcaggctaaagagaaatgcggcaaaaaagattagcatcttactggtctttttcagcatctcgaaaacaataggacgcagccgcccatgagcatcatcctttttatccgggcgttgtagcgctttatagaccacattaagtagccagttgatgagccagtaagtaatgagggtgacgaaaaaaacgaccgccagattgatccagaacgtcgttgacatcagcatcgcaacgatatttagtcgtgctaaatactccattttacctccgatgaaaagcagatgaacattacagtatagacgtcacatcacggaggccgatttccggctttactattgctgttttattcagcacttttgttcaaaaagtatgaaaaagaggggtagccgtttggctatcccggcgtttctgtgcagacttatctactcctcttaataaaataaggagtcatttatgcaacaagaacatcgtgagtgtattgagcagtgttatgaatgcgcggcggcgtgtgatatctgcgcctcttcttgtctgcgtgaagataacgtcgaaatgatgaagcactgcatccagttagatatgcaatgtgcggccatttgtcgcctggcggcgcaatttatggcgttggaaagcgagtactcacaaaaattatgccgcctgtgcgcggatatctgcaaagcctgtgccgaagagtgtgcaaggcacgatcacgaccattgccagaattgcgcgcgggcatgcagccaatgcgcagacgcctgccttaaaatggccgcgtaatttttcttccgccattagctcaaccggatagagcatagagcttctacctctaaggttcggggttcaattcctcgatggcggaccagttgatatcaaaaaaggccacctgcgcggtggccgctgagtttctgttgaaataaatgcaatgttataatataacaatcatctttctaagaaagatgagggtaacgttttggtgattcatttaaaaaaactgacaatgcttctgggaatgctgttggtaaatagtcctgccttcgcgcatggtcatcatgctcatggcgcgccgatgacggaggttgagcaaaaagcggcagcgggcgtgtttgatgacgctaatgtacgcgatcgcgcgctcaccgactgggatggtatgtggcaatccgtctatccttatctggtcagcggcgagctggaccctgtcttcaggcaaaaggcgaagaaagacccggagaaaacgtttgaggatattaaagcgtattatcgcaaaggatacgtgacgaatgttgagacgatcggcattgaaaatggcgttatagaattccatcgcgacaataacgttgcatcctgtaaatacaattatgccggctataaaattctgacttacgcatcgggtaaaaaaggggtgcgctacctgttcgaatgtaaagatgcgaatagcaaagcgcctaaatatgttcagtttagcgatcatatcattgccccgcgcaaatcggcgcacttccatatctttatgggaaatacctcgcagcaggcattgttgcaagagatggaaaactggcctacctattatccttatcagttaaaggcgaatgaggtcgttgacgaaatgctacatcattaagtctgattgcaatgttaaaagctcgctatgaatagcgagctttttttctgccgttatgccatatttctggcaatcaatataaaaaatacctgcgcccccggagcgatgatgacgctgtccataccgccctcgattcaatgccaaacggaagcggcatgtcgcctgattactcgtgtcacaggcgatacgttgcgtgctattcatttatatggttccgctgtcgcgggcggtctgaagccaaacagcgacattgatctgctggtgacaatatgccagccgctgacggaggcccaacgcgcaacgctgatgcaggaattgctggcgctttcatcgccgccgggggcgtcggcagaaaaacgcgctctggaggtcactgtcgtgctttattcgcagctggttccctggtgttttccaccttccagggaaatgcaatttggcgagtggctaagagaggacatttgtcaggggatttatgaaccagcgcagcaggactgggacatggtgttactgataacccaaattctggaaaccagtataccgctaaagggagaacgcgcggaacggctgttcacgccagcccctgcggcgcagttgctgaaggccttgcgttatcccctcgacctttggcaatccacggcagatgtgcagggagatgagtatcatatcgttttaaccctggcgcgtatctggtataccctttctaccgggagatttacctctaaggatgcggcggctgactggctgttacctcagttgccagaagattatgctgccacgttgcgtgcggcgcagcgtgaatatttaggtctggagcaacaggactggcatattttgctgcctgcggtcgtacgctttgtggattttgccaaagcgcacatccccacgcagttcacataagatgccccaggacgtctgtcaggttgcgcaaacggcgttcctcaactactacttaataggttctcatcgctgaagtaagcagatgatcttatgcgggccatcgaatggatattcccacatggctctcgttttgttgaggtggatatgactggttccgcatcatctgttttaaagacagatacaagactattgagcgaaaacctgtttcttaattatggtctggagtccttatttaaggacgtcgcaataatagctggcaacgtaaattatattatttttgatatcgacgattactacaccgtacagcagtatattacttccacatttaaaacggtactcattggaattgttacccataatgaatataactttattgatgaacatcatgtcatatatcgaataaaggtcgatgcctctattgctgagtggcgcgaattactgattttggccgctgctggtcaattttttcccaggtcagagaaagtcagattaacggcgaatgaaagaaatgttttggcgatgcttgttaaaggaatggatatccgacaaataagctgtgagctgaatgtacatttaaaaactatttactcagtacgctaccatgttctgactaaattaggttgtagaacagttctggattatcaaatactgtccgtttctaaagcctttacgcactggcttacaataaataatgttgataatgtaatttcccgtgtaaatagtaaggtcattgcttaataatgatttgcttctgatggcgtttaggttcactatgctttcttacatcatcatgaggccagacaggcatggctacttttagtattagcgcaatggcggcgcagtgtggtgtcacaacagcaaatatcaggtcctgggaacgctatggcctgcttcaacctaccaaagatgaagctggcaatcgtttttattgcatagaagatgctatcagaatacagcatattatcgacgcgttaagcaaaggcttttcattaaaagagattaaacctgccctctatggtgaagaaacgcattgccgctcgggatggttattctaccaggaagagattttagcgcagtgtagaaaattcgaacccgccaaattgcgaaaattactctggcgttatggtcgggaaattccgccgtgtatcgtcattgagtcaatactgcgtcctttacggctgtggttgtccgcaggcgatgatgatgcacgccgatttgaaaaggcattactggatactgcgattattgaatacgccacgttccagctaagtagcgtacgaaaggcgccagcaggcacaatgcttattgctgcgttttcgctgaacgaccccattgagctatggctggaaacgattaaatattgtagtgaaggtatgcgagttgaagtcatcccctggcaggcgccgatgcccgatcttttatcaacgtctttcgagcatattgttctgtggcatgatgagacattaactcccgcgcaggaaaatcttattcaggctttaaaagaatcgggtaaatttagtcttcatgtgaaaaatggctcaggcttaacattactgccagccgtatatcggcagcatgagatgccagaaagcatgcagcatgttgcaccgcaaatccatgcaaacggctacgaaaaatcaggcaccgcacgttgaggcatctgcattattaacgaacaggggaggagtaaacccctcccttgtttatactcttcatacttcaagttgcttatgtgttggctacggattactcggcccatccatgggcctcgccctgacgggccgtcgcacgcgacgttcaaatctgctcccggcagatttgtcgttcaccccagtcatatagttatctatgcttctggggactcactcccttgccgcctttaagcaactcgaattattttgggtatatattagatgtcgtcaggtgtctgaaacaaaacggcttctaaggcattacggtaaatatcaagctgcactacgtctttttctgtttccagtttttcaataagtttggcgatgacatccttatttgagacatgctgctgcgattgcaatagttcgtaagtaatttcctgaatagctcgctgttcacataacatatgtgcagaaaaaggattgccagtactattttgttcgttgactagtgtaatggtagtcatatttcaccatattcgatgtaaattgaagccgatctccctgagcgggggagagaaattagtgacctattaaagttagacctatatcataaaactgtaataaaaaatcataaaaacgtgatgcgcatcacatttgtgtgatttgttgtatattttatacactttaaatgaagattccgcagaatcaacggcctgttcttttttctcactccagtttaaacgaataagcattaatacccatctgtaataattacttaatgttatcttaataaaggtaaattactgtcaggcctccgtaaaaggaggttgattaatgattcgtcatatcgccatttttctttgttctttattgatgtgcagcaccacttttgccgattcggtaacgtcggtatcgcttggcgcgctcttaaccgcgctcaatgaacgcatgttattaatgaaagatgtggctgcttataaaatgaagcaccatctgccgatagaggatttcacacgtgaacaaaatgtttttgccgaggctgaagaagaagcgaaaaataacggtctggacccgcattcgataaccccttttattcgttcgctaatggatgccagtaaagcgatacagtaccgctatttagcgcagtggcgaaccggctcagaaccctcctttccgatacaaaccttgtcggtcacccggcaacgtattcgacaacttgataatcaaatgttgatcattatcagccagcgcttgatggtcggcgctttcagccacgacgatatggtgtggctgagagcgcagtttaatgcgccgaatctgaatgagagcgatatcagtaatgtgttggcagccttatctttggtgcgacgcgcgcgttaactccacatgaggagaggtgggccaatacctggtgattgcctgcggaggtagcgataaaagaacgcttttaggtgatttggatataagcgtggcggaatagcggctggagagacgtggtttcgcttcccatcttccggtgcattcgttagcatactgtttcgcagctaagcgtaaatgttttcaggaagaggttaatgtgttcgcggagtatggtgttctgaattattggacgtacctggttggggcgatttttatcgttctggtaccggggccgaatacgctttttgtgcttaaaaacagcgtgggacgcggggttaaaggaggatatcttgccgcatgcggcgtgtttatcggcgatgcgatattaatgtttctggcgtatgcgggcgtggcgacgctgatcaaaacaacgccggttctgtttaacattgttcgctatctcggcgcgttttatctgctctaccttggcgcaaaaatcctttacgccacgctgacctcaaaagggcgtgcggcgacggaaacggtagttccttttggcgctatttttaagcgtgctttaattcttagcctgacgaatcctaaagccatacttttttatgtttccttttttgtgcaatttattgacgttactgcgccgcatactggggtgtcattttttattttggccaccacccttgaaatcgtcagtttttgctatctgagctttttaattctttctggcgcttttgtaacccactatattggtaccaaaaagaaactggcaaaagtgggcaattctttgattggccttcttttcgtcggatttgccgcccggctggcaacgctccagtcttaaccacctggacccgtcgtcaacggcgggtcattgctctcctttcggttttattgcgtggaaaacagcaaaatagtaaccaataaatggtatttaaaatactgtttttggagcgtaacctttttacgacagcgatgagattatcgctgagtaacctgcgtgaagagggaagcaaatgcggcaaattccacaaaatcatattcatacacgttccacgccattctggaacaaagagacggcgcctgccggaattttcgaacgccaccttgataagggaacgcgacccggcgtttatcctcgtctctcggtgatgcagggggcggtcaaatatctcggatacgctgatgaacattgctctgagccggaagagatcatggtgatcaatgccggcgagtttggcgtgtttcctccggaaaagtggcacaatattgaggtcatgacggatgatacctattttaacatcgacttttttgtcgcgccggaagtactgatggaaggggcgacctcacgaaaagtcattcatgccgggagagaataataatgggaaaagctacttataccgtcacggtcacgaataatagcaacggcgtctctgtggactatgaaacggaagcaccgatgacgttgctggtacctgaagttgcagcagaagttgtgaaggatttggtcaataccgtgcgttcctacgataccgaaaacgaacacgacgtttgcggttggtaaggatcttgtagtatctatttgatataaagtgattttttaaatcagaagccgcatcgcgcgtcgccagcgtgatgcggtttttgcgtattgaaaagcgctgtttatttacatcagacatgggttgaaaagaaacattaagaaaacattaagaatatcgcattgtttgctaatgagagcgtattcataaaacttatgattgggtattaaaaaccagaagagtcttataatcatgaaactcgatacccgattaacttcgtcagcacttactcttgcgcttgccgctgtggtcatcccgtttacggcggactggcaattgcctttgcttaacggcgtggtggtccgatggattgaaaacggacaagcgttatggttactgtttggggcgctatttaccgcctggtatatacggccactttcccgtcccgaaggggcaaagcagttttggctatgggctgttgtctggtgggtggtgctattgggtagaagcaccagttgggggcgtgactatttccctgacgagccgcgtatgctgttcagaacgatttcagtgatattaattgctgcgttagtcttgccagtcctgttttctgccgggctacgtaaggagattgttcgtcgcctacgggacgttcctctgccattgtggctgtttgccgtgacgacatgttcatatctgatttccgacactgtcgagcatcatcggtggttgtcgccgatattcctgcataacgctcgttacacggatttgattgaagagctttatgaagtgccatttatgatcggtttgtttatggtgaccgtggggtttatgcagcaggacaagcaggatgaatgtacggcgctggagatgaccccgtatcacgcaaaatagcgcggctgaaaaaagaccatgaattcgacatgggatagatagcggttagcaaaaaaagcccgcactcggtgaggcgggcaaataatactggaagcaatgtgagcaatgtcgtaccgaacaggtgggttataaactcaaccactcggtattgataaagataatcgttatcattaatgattgcaaccctgatatttatgcgcttttatccacgacgctaaaaggtgatggacatcacaaacttcactttcctgacgatgtgctattctttttaacggcaaataaaccgctaacgttaagacataagtgaggaaaaaatgggcattctttcatggattatttttggacttattgcgggtattttggctaagtggatcatgccaggtaaagatggcggcggattctttatgacgatcattctggggatcgttggtgcggtagtcggaggatggatcagtacgttctttggctttggcaaagtggatggtttcaacttcggcagctttgcagtcgcggtgatcggcgcgattgtcgtgctgttaatctacagaaaaatcaaaagctaaacgcagaactttcagagataataaaggctacgacaggtagcctttattattcaaaatgaatttaccaccagcccagttcggtacccgccaccgcaattagcgcgatgcccatcaacaccatcgttgttttcctcatggttatgctcccggcgcggcgtaaccgccaataaaaaaccatgccaaaaataatattgccgtaatgaaaatgacgacagggaagaggatacccactctcatgctattaccttcactgttcagggggcgccagaatagcagggttttctcagcgacaaaaggttggttgctttgtgacagggcgtggctattgctgacttaacccgggataaacacccactaaagcgctgacagaaagtatggaaatagcgtacccgccaggttatcctggacaaaatatcgctttaaggagtcgttatgaaatttacgtggattgcgttgccaggcgtattgctgctgagcgcttgttcatcgtcgcaacccaacgcccccaggccgccgcgtattgggatgcctaatccggcagccgtctactgtgagcaacagggcggtacgctgatgccggtgcagaccccacaaggcgtgcgttccgattgcaaattgcccaatggcgaaatcattgatgagtggacattatggcgcagagagcaccctgatacgaaaaagtgacaacctgcggtccgacgggatatgattaagaacaatctgataatgagtttcatgcggcgcaagaaaatatgtttcagttaaagccgggcgcgttggcaatagttattggcgctaaaacacccgccggacggcagaatattggtaaatcggttgagctattttgcctgtgccaacccggagatgaattcattaatccagtaaatggacacgtcaccttactgccgaaagaagcgcctcgggcgctgtggctggttacgggcgacgtagcctccgccgatggccagcacggttttgcctgggtgcgggcagaacatttgatgccgttgtccccggacagacaaccaggccaggcggcggcacgacaatcacagctctcgtagccactctgccagcacaatggcatggttctggcgagtatctttagcggcgtatagcaacgttagcggctggtgtcgggcaatatccgccagacgtttgccttcttgatgctgttgcgcaagttctgcccggtattgctgcgcgaagtggttaaaatcaatcagttcgctatgaaaggctttgcgcaattcggtggagggcgtaatggccttattccattcatcatagaccagcgctgcttttttaatgcctcgcggccatagcctgtcaaccaatacccgataaccatcgtctttttccgccgggaaatagacgcgcttacactggattcgcatttttccctcctgtgatggtgtcgcttacggtacttttgtcggatagcggtaatgattttaatggatcaggcctgataaacgaagcgtcatcaggcattcaagtgggtatcaggtttatttatgacgctatctctcgatcgcgtccggcgtagaggccgaaaatcgccatgatgatagccagaaccgtcacgcctgacagcggtagataccagctaccgctggcatcatgaagttttcccatgacgggcggcccacatgccgccagtaaatacccgaccgactgcgccatgccggaaagcgccgccgcctgatgcgccgaactggcgcgcaggccgataaacgtcaggccgaggatcatcgtcgcgcctgaaccgaagccgaacagtagcgtccagatgatcgcctggcccggcacaaaccaaagccccgccgcgcccactgcgcacaatagtgagaccagcgcggcaatccagcgttgatcgttaaagcgatgcaaaataagcggaatagctaacccaggcgccgcggtcgccagttgcagcaggccatgtagcgatcctgcctgtgcttcgctgtaaccgtggctgatgagtattgttggtaaccagccgataatcacataataaatcagtgagttaagtcccagaaacaacgtaacttgccaggctaaaggcgaacgccagataccgcgttcatgtaatgcccgggagctactcaggttagctgagcgggtagtgcgccactgcggcaaccagataagaaacgccaacagcggaaacagcatcagcattaacagcgcgccgcgccagccaaaaccgtgcaacgccagcggaaccaccagcgcggaccccaacgcggcggcggcgcccatcgtcaatgaatacgcgcccgtcagcctggcgacatgttgtgaaaaatcgcgcttaatcaatcctggtagcagcacattacccagcgctatcccgcacccaataatggcagttccggcaaacaacaatgcagcggagggcagggagcggagagcaatacccgcgcaaatcagcagcattgcggcaaacagactgcgttccatcccaaaccggcgggcaataccggccgccagcggcgaaaccagtgcaaacgccagaagcggcaaggttgttagcaggcccgtctgggcggtggaaagaccgtaatccgaacggattgtctccagcaacggcgcagcgccggtaaatgttacgcgcagcgtagtggctatcatcaaaataccggcaatcagtaaagcgccctgtttgccgcgtggtgaaagggctgtcgtcatcgttttctcatctcgtcaggcgaggcgataccttaacagtttttactgtttggatgaatcaagctaaaatgacaatttatcgctaaaatcggacaatataatgattggtctgagactggacggttacgatcccgaccttcaccacgatgccgctgtggccttttgtattcgcgccagggatgatgaactgtttagccctcgccatcagcatcgcaagggacagttgattctcgctctgcacggcgcgattacctgcgaggtggaaaatgcgatgtggatggttccgccccagtatgccgtctggctccccggctcgctgccgcacagtaatcatgtgaccgcaggggcggagctgtgctttttatttattgaacctgcggcggtcgtcatgccggagcgttgctgcacgctgaaaatttcgccgttatgccgggagttgattttgtcgctggcgcgcagaaccgatcccgaaagagcgcaaatgccaacgcagcgccttattcaggtgttgtttgatgaactgccgcagcagccgcaggaacaattgcaattaccggtatcggggcatccgaaaatccgccaaatggttgagacaatggcgcaggagcccgcgcgatggaatacattagggcagtgggccagcgtattcgcgatgagcgagcgtaaccttgcccggctggtcgtcaaagagacgggactaagctttcgtcgctggcgtcatcagttgcaattaatcctggcgctacaagcgctgatcgcgggacgtaatgtacagcagacggcgcaaatgctgggttatgattccaccacggcattcattaccatgtttaaaaaaggcctggggcagacgccaggccagtatctgacgggcgagttactgcttccccacaattaaagagaccagccccgccgcaatcagtgggccgaccggcacgccgcgaaacagcgcgacgccaagtaccgtaccgaccagcagcccggcgacgagctgcggttggtttcccatcagcgtaatgccgcgaccgcccagccaggagacgaaaacgccgacggcaatcgcgaccagcgatttccagttcacaaaagagtggatcaatgtggagggcggtagggttccgctggcgatgggagccattacgccgatggtcagaatgataatcccgacggtgagtccctgtttttcaatccagggaaaaaaggtattcaacggggttacgcggacaataatcagcaccagaattgagacggcgacagtggtgttgtggctgataaatcccagagctgccagtccgagcaggatcagcagagtgacatcaaacattatggtttccttgccaaaaagtaagcctgactactttacgcccaaacggcaaagcgcacaggcctttttaacgattgatgcggatttcaggcaactgcctgaaagacaatctctacgtgaaaaacggcgttgtcattaaattgccatcaacgccgcgtattgctaacaggtgaaccgtcattgttgtcttcctgaggatacaattatgtacgatccaccgtttcttgaagcgctgatgattacggcgtcgtttttcgccatttttatcattatcgttgtgtcggtattgctccttgaagggggaggggactaagccgttggcgatgactgaaagcggcggaagactgccagttctggtcgggcgatgcgcagatagtcctgtgtattcataatgactgatttttccagcaggccggcattaaaggcaatttcatcgaaacgctcaaacaggagcggatcggcgaccagtttcagattggggtgaaaactgaaaggcgggatcgcgccaaaaacgcagccggtcagcatatcgacttccgccgggctggcaagggaagcgcgtaagccgcccagatgtgaagcaagctgagagaggtcggcttgctgatcggccgccagaatagcaagaacgtgctggttgacgccgttgcctttgactttacagaccagcgcttttgcgccctggcccagcgcagtaccacgtatttcagataccgcttcgcatttccctaccgcttcatggttcaccacacgatagcgcgcgttctcctgggttaataaagccactaaacgttggtgtgtagcgacacccttcgcgacttcagtcatttcggccatttctcactcctggtgcaatatgaacatttactgcgaagcactatgatgaacgatgttgtttttgttgtttgttcagatagagctgcgcatcggaagcctggtaggcatcattaatcgtatcattgggctgcatattataaatcccggcagaaaaatggactgtcttatccggtgcgataatttgcaggttacgaataatacgctccggcagatggatagccaaatccgccgcgtaatcaacaagaataatacagaactcatcgccgccgaggcgaatggcgtaatcgcttttacgaatcgatgttttaatcgctttcgccaacagggttataattcggtcgccttcctggtgcccctgggtatcgttgatcagttttaacctatcgcaatcaatagcgacaaatgtcaccggcgtcccggtattgaccaggcgttgcagtcgctgttccagcaccggtgttaatattttacggttgtaaagcccggtcatggcatcgctaatattttcgcgtgtgacgttgcgataaagccgaaagtgcatccgtaccatattaagcaggagcgccgttgccagtaagtaaaaggccagcgctttccaggacgagacaaggaaataggttaaatcaagggacaacgaaacgcgcagcccaccagggatatcatggctataattcacatattgaaacagattatttttgctttgattaataataatttcttttccggagtccatatcctttagtgttacgttaagataacgccaaaccagcggacggtcctgggtataaaaaatattttttaaattatcctggttaacatccaccatcacgatgccttttaacgatcccgccagatagactggcgttaaaaaactcatgacgttttcctgagtaatatcatccatgtagatacttgaaataaccgtacggccggtaaaaagtttatctatatcttttctgttaatacccattgtgcctttttgtaaaaaagtccaacgatgcatggcgaagcgccgtgagttgattaaatcatagaaatagacataatgtttatttaaatcaacgtaataacggaatttaagctccagtgtgcccagcccgtgactatggtcgtcctgcgaacggttgatgcttaccgcctgatcaaatgcaggcagtaaaagggcgtcatcaagattatcggtacactgtgtagcggcggtttgcagagtaccatgtagcgccggataattatgccgggtcaggttgacaccgtgcgtaccgttaatagcttcaaaggcgtcgcaaaacgcgcggtgtttttctgcggtgacggggtctcccggcgcttcaaaagttcgcatcaaatgtgcggcgatgctctgattctggtacttatcgtacaaaaacgacgaatcggctctctccatgatataacgcatataggcattcattgccctgtcgctggcaataagttcgtaaatcaggaaggacgatgtcaaaacgatgacgcttgccgagataaagtgcctgagcgctttatgatgcaaattcatgatgaactacagccctgaaagtcggatgcgttagtttaccatagcgatgagaattcctctaatagactgtttaaaaataaaacgtgttgatgttatggaataaaaatcattctcgatttaataaattcaataatatatggtgttgatattttcagtcgtgactattgtcgcaaaaagtaaattgttaattaacggcatcgatttaacactaacgaaaataaaatagcctttattattacgcgaaaggagtgtgaagtggtaaggataataatgtacttccgttcggaggcactatgaaacgatttaaagaaatggcaacaatttttctttttgcattgctggctgcggggttcacgtcgtctgctatggcagcgtcgggtagtgatagtccgtgggattttgatttttcgggtccatggcttttttgcaaactacaaccccctgattctctgcaattaccgccacctcctggtgagtattgctggcattaataaatccatagtatttcagtgataagtcggcgcatgtaaggttaatccagtcaggagatatacaggtttacggctattatagtggtagtatgtataattgccttgttagtgataaatcagcccgtgactcattacgggctgatttatggttatgcactttgattggcgctctgtttctgaaacaattcgcggaataccggataaatatcctcctgatcgcgaatatgctgcatggcgaagttatcgaacgtcgcctgcagatgttcatactcgcgccataaggtctggtgggcgcggcgggtaatctcgatatagctgtaatagcgcactaccggcagcagctttttcgccagaatctcatgacacagcggtgaatcgtcggcccagttatcaccgtctgacgcttgcgccgcatagatgttccactgaccggggtcgtagcgctctttaaccacttcgtccatgagtttaagcgcgctggagacaatcgtcccgccggtctcttgcgaataaaagaactcatgttcgtccacttccttcgcctgggtatggtggcggatataaaccacttcgacgttcttatacgttcggctcaaaaacagatagagcagaatgtaaaaacgcttggccatatctttggttgcctggtccatcgaacccgagacgtccatcagacagaacatcaccgcctggctggagggctcaggccgtttttcataatttttatagcgtaaatcaaaggtgtcgataaacggcactcgctcgattttagcccgtagttcggcaatctcccgacgtaaccgctcctcttcaagcagttgcgctggttcgctgtggctgatggtctccagttccgtttccagcgcgtgcagttcgcggcgttttcctgccgtcattgctgtacggcgcgccagagagttttgtagcgaacgtaccacgctgatattggccggtacgccgtttgaggtgaaaccggcgcggtgagttttatactcgttaagctggcgatgctggtttttcttcagattaggcagcgctaaatcttcaaagagcagatccagatactcatcttttgaaatctgaaaaacaaactcatcctggccttcgccgtcctggctggcctgaccttgaccgctgccggaaccgccgccgccaccgccttgcggacgctcaatgcgatcattctggataaagtgatcgttacccggatggacgcgatggcgcagaccgccgcgcccctgatgaaacatcggttcgctaatatcatcggttggaatagagacggactctccgctgtcgacatcggtcacagagcgtttattaatcgcttcggaaatcgactgcttaatttgtgctttataacgacgcaaaaagcgctggcgattcaccgtgcttttatttttgccgttaagacgtcggtctatgaaccaggtcatatgccccccgtactgccaactgagcgcctgttctgtcagtgccggatagcgctaacgcttagccagtctacagaacattactttgtaggcccggtaagcgcaagcgccaccgggcattaacatcacgacgatttacgcacgcgcaggtaccactcgcacagcaaacgaacctgtttacgggtataccctttttccatcatccgatcgacaaagtcgtcatgctttttctgctcgtcagtcgacgttttggcgttaaaagaaatgaccggcaacagctcttcagtattggagaacatttttttctcaatcaccgtgcgcagcttctcgtaactggtccagtttggattacggccgctattgttggctctggcgcgcaggacaaagtttactatctcattacggaaatctttcgggttactgatacccgctggtttttcaattttttccagttcggcgttcagcgactcgcgatcgaacagttgaccggtatccgggtcgcgatactcctgatcctgaatccagaaatccgcataagtcacgtaacgatcaaaaatgttctgcccgtactcagagtaagattcgagataggccgtctggatctccttgccgataaattcggcgtatttcgggatcaggtagcctttcaggaactccagataacgctcagcctgctcctgcgggaactgctcgcgctcgatttgttgttccagaacgtagaacagatgtaccgggtttgccgccacttccgcatggtcgaagttgaatacgcgggagaggatcttaaaggcgaatcgggtggagagaccgttcatcccttcatccacgcccgcatagtcgcgatactcctggtacgatttggctttagggtcggtatctttcaggctttcaccgtcataaacgcgcattttcgagtaaatactggaattttccggctctttcaggcgggaaagaatcgagaaacgcgaaagcgtttccaacgtgcccggcgcgcagggcgcatgagccagctcgctatgattaagcagtttctcgtagattttgatctcttcggagattcgcaggcaataaggcaccttcacaatatagacacggtcgaggaacgcttcgttatttttattgttacggaaagtcacccattcagattcgtttgagtgggcaagtatgatgccattaaagggcagggcggaaataccttccgtaccattgtagttaccttcctgggttgcggtcagcaaggggtgcagcaccttaataggcgctttaaacatctcgacgaactccatgatcccctggttagcgcggcacagcgcgccagagtaaccatacgcatccggatcgttctgggcgtgatgttcgagtttacgaatatccaccttgccgaccagcgccgaaatatcctggttgttttcatcgccgggttccgttttggcgatggcaatctgctccagaatggagggccagactttcaccacgcggaatttagtaatatcgccaccaaactcatgcaggcgtttggccgcccacggggacataatcgtaccgagatagcggcgcggaataccgtactctttttccagaatctgcgcgtcttcctgcggattaaacaggcataacggatgatcgttgaccggactacgctcgccgttggcgcttaaaacataaattggcacgcgctgcattagcgatttcagccgttcagcgagcgatgatttgcccccccccacaggtcccagcaaatagagaatttgcttcttctcttccagcccttgcgccgcatgttttagataagagacaatctgttcaatcgcgtcttccatgccgtaaaactcttcaaacgcaggatagcgagcaataacccggttggagaagagtcgggaaagtcggggttcctgggcagtgtcgaccatattaggctcgccgatagccattaatagccgctctgccgcgttggcataagcactgcgatcttgccgacaaatggtaagaaaatcctgcagtgtgaactcttcgtccttggcagcttcgtaacgctggcgatagtgatcgaatatattcatgatatgccatcctttcgttttttcgcacatgttaagagccgttcatatgaatagtagaggctcccggaagaggtagactgaacgccgtctctgctaaggaaaaaaaaagcaactctcatgccattttattggtcagaagattaacgtgtccggtgatacaccttcttaacattaagcgtagatggcatttgcaaaacttgcctgtacgcgtcagtggatttcgatgacatatcaataactcatcaggtagaaaaggctggtggatatcagaaaaagcgttcccggtcacataacgatcatcagccgatcatctgaaaataatcggttgtggtgatattaaacggttacattgtgtaaaatagttgggcttacaggtattggcggttacacttttgccgcagaacatttgaataaggaattatggattgtgaccaaacttaaacttctggctcttggcgtgtttattgcaacatccgccagcgtcgcgcacgctgaaagcaacctgacgttgggcgcaggcgttggtgtggttgaacacccttataaagattacgatagcgatgtttatccgataccggtcatcgcttatgaaagcgaaaacttctggttccgtggtctgggcggcgggtactacttgtggaatgacaatgccgataagttgtcaatcatggcatactggtccccgatgtacttcaaaccgggcgacagcgatgaccatcagttgcgtcgtctggacaggcgtaaaagtactatgatggcgggcgtttcttacgcgcatcacacccaatatggattcctgcgtacctcactggcaggggatacgttggataacagtaacggtattgtctgggatctggcctggctgtatcggtataccaatggcgggctgaccttaacgccaggtatcggggttgaatggaatagcgagaaccagaacgattactattacggcgtatcacgtaaagaatcttcgcgtagcggcctgcgcggctataacccgaacgatagctggaacccgtatcttgaacttagcgctaactataatttcgccggtaactggagcgtatatggtactgcgcgctacacccgcctgtcggatgaaattaccgacagcccgatggtggataaatcctggaccggtatcctttctactggcgtgacctatagattctgattgattgaatttgccggaaaaaccacgacaaagcctgcgttatgcgggctttgtgctgtctgaaacgcgaacatgacggcttgcataaatgcgctgttgaccgggtatggcgcagccttatgtgatttatactttgttacatcaatttaaaaaactagccttttatatgaaaaatccaggtgattacaactgcgctaacaattagcgtaataattgttgcaatgctggctgatatcgccctgtcacgtcccgcttatgctatacccattcttcacagcgagtaagacgaatgagcatagtattcaataccgtagccaagcccagcggcagtctgtgtaacttatcctgcaagtactgtttctatcttgataaaccccgggggcagcgcgtcatgtctgacgatgtgctggagacgtatatccgccgggtaattgatgatacgccatcctcagaggtctcgttttgctggcagggggagagccgacgctatgcggtctttctttttaccaaaaagtggtgcgcttgcagcaacgctatgccaacggcaaaactatctacaacagtctgcaaaccaatggcgtattaatcaatgaagagtgggcggctttctttgcgcagcaccagttcctgattggtatatcgattgatgggccgcaagtcgttcatgataattaccggaaaacgccgtcagggcgggcgtctttttcccgagtcgttaatgctatccgccttctgcaggcaaatgatgtcgagttcaacacgctcactgtcgtgaatgatgcgtcatgctgtcatggcaacgctatttatcattttttgacgcaggaactggaaagtaaacacctgcaatttattcccattgttgagccgctcgcgcaaaaagcgcagcgttctttgacgttatctgacaatgaggattcgccttcgctgatgcccttttccgtcacgcctgaagggtggggcgcctttatgtgcgatgtttttgatcaatggatacgtcacgatgtcggacgcatattcgtacagctttttgataacttacttggcgtctggatgggggagcccgccacgctttgtacgatgcagtcgacctgcggacaaagtttgctggtggagcagaatggcgacgtgtttagctgcgaccattttgtttttcccgcctataaactgggcaatctgcagcaacactctttagaagaaatggcggcctctccttttcagcagcagtttggcgcggctaaagcaaacctttcctcacgctgccagaactgtacgtggcgctttgcctgtcacggcggttgtccgaaacatcgaatttgtatggacggcggcgaacggcaaaattatctctgtaaaggatatctggagttctttcaacatgtgacgccctatatgaatgtgatgcgtcaattattactgaatcagcgacccgccgcgcatattacccgcatcgtcgacatgattgcggatgacgttcgtcagtgacaagaaaatcgcccccttgcgcggtatgatgccggacattaccgtagggtctaagagtcctgtattgttttaccgtcgagtgacattgaaaaggaaatgaaatcagtgaaaaacgtaacgttttgcgggcaggtgacgcttcctgccatcggacagggaacatggtatatgggcgagcgcgcggatcaacgtcagcgcgaggtttcggcgttgcgcgcggggctggatttggggttacgccttattgatacagcggaaatgtatgccgacggcggggcggaaaaggtcgtgggcgaggcgttagcagggcgacgcgatgaggcatttctggtgtcaaaagtgtacccgtggaacgctggcggccagaagatagttgccgcctgtgaagaaagcctgcgtcgtctgaaaacagattatctcgatctctatctattgcactgggccggaagcttttcattcgaagagaccgttgaaggtatggagcggctaatcgcgcaggggaaaattcgccgttggggagtctctaatcttgattatgacgatatgcaggcgctgtggcgcatccctgggggacagcaatgcgcgacaaatcaggtgctctatcatctggcgtcacgtggtattgagtatgatttattgccgtggtgtcaacaacagcgaatgccagtgatggcctatagcccgctggcgcaggctggccggttacgtagcggtttactgaatcatccggtggtgaatgaaattgcgcaagcgcataacgctacggcggcgcaaatcttactgacgtgggtgattgcgcatccgggcgtgatggcgatcccgaaagccggaagtacagaacacgtgaagcaaaatgcggcggcgcttgagatcgccttgtcagcaaacgaacttgccttactggacaacgcctggcctgcgccaaaagggaaaaccgcgttggatatggtgtgacgccggataaaatgtgtaagcgccgccatccggcaggtcatgcctgatggcggctgacgcctttcagatcctatagtaacgccgttatccattcacttttagcgtttagcgacgcagatagtctgcgccagacgagagggtttttcttctgtggcttgttgcggcgcagtagcgtaaaccgtttcaacgcagacaaacgttttatagccgtcatccggcatgtcgcccatgctgacggacaacgccgggccagggttccagcctacgacgttaaggtgatggtggtggaccacatcaatcgtgcggtttaatgtcgcatcgtggatcacgctacatgcttcaggattgaggtaaacgcgatcggtacggtccggaaaggtttgtataccgtcggtcaggacaccttctttagcgtcgttaactttatcaataaaccgatcgccgagtccgctgaccttaacgttggcgatgtcgccaacgttaaaatagctgtggagcgcggatgtggttgcaaattcgccatgcgcttccagttcaatttcacaggttttacccactttaaaacgtgccagcagcgtgaaatcgtgcggccagtatttccgggtggcctcactgctttgcagctcaaatgtcagcattacgccattatcatcttcattatgcgcttttagcgcccacggaagattacgcgcaaagccgtgtgacggcagaccctgttgagccgcaggtccaaaccagggccagcagatcggtacaccgccgcgtagcgccacgccggttttgaaaggcgtattattactgagccacaatacctcttcctcgccaacgggtttccaggagagaaggtgcgcgccctgtaatgcaaaagaggctttaacctgcggatggtcaacgacgatcagatccaggtcatcaagctgacgacgggaaaggacaggggtaagctgttcgataaccgggagggcaaaaattttattaatcattacgcaatcctcttaaccctaaataattcgagttgcatgacaaggcgcttgtgccttgaccagtgcttgcgctggcccgtagaggcgaggccgcaggccgagtaacgcggcaagtgaacgacaaattcatcgggaacgaatttgaacaaccgtaggtaatctccggccagggacatggacatccctgattcatcccgataagttcgacttccgtcagtgattcgggtgagaaagcatagccaacacacctgcaacttgaagtatgacgggtatatctttaagcaaaaaaaagagcgacctgagtcgctcttaccaatgactgtgtcatctcaacttatttggagatgtgagcaatcaggtccagtactttgttggagtaaccggtttcgttatcgtaccaggagaccagtttcacgaagttgtcgttcagcgcgatgcctgctttagcatcgaacacggaagtgcatacttcaccgttgaaatcggtagatacaacgtcgtcttcggtgtaacccagcacgcctttcatttcgccttcggcagcagctttaacagcagctttgatctgctcgtaggtagccgctttttccagacgaacggtcaggtcaacaacggatacgttcggagtaggaacgcggaacgccataccagtcagtttgccattcagttccggcagtactttacctaccgctttagcagcgccagtagaggacgggatgatgttctgagatgcgccgcggccgccgcgccagtctttgtgagacgggccgtcaacggttttctgggttgcggtagtcgcgtgaacagtagtcatcagaccttcgatgatgccgaagttgtcgttgataactttagccagcggcgccaggcagttggtggtgcaggaagcgttggaaacgatgtcctggccttcgtatttgtcaaagttagcgcctttaacaaacattggggtgttgtctttagacggacccgtcagaaccacttttttcgcgccagcggtgatgtgtttacgcgcggtttcgtcagtcaggaagataccggtagcttcagccactacgtcaacaccaacttcgtcccatttcaggttagccggatcgcgttcagcggtaacacggatttttttaccgttaacgatcagatgaccgtctttcacttcaacagtaccgtcgaaacggccgtgagtggagtcatatttcagcatgtatgccatgtactctgcgtctaacaggtcgttgattgcaacgatctcgatgtcagaacgtttctgagcagcacggaaaacaatgcgaccgatacggccaaaaccgttgatacctactttgatagtcatatattccaccagctatttgttagtgaataaaaggttgcctgtaaaattacaaaaaccttacgcagcgtcaagcggaatcgtgtcaatcattgcgacaaatcaatcctctgcacaacctttgcgcggctgattcgcctcactcttcctttcggcttgaaaccacatgggggcgccgccccgaattttaaagggcaaccgagataataatgtgacatcagtcacgattcgtgagccgccatttcgcaatgatcaagtttagaacaaaagttggtactgaggtgttaatgttttgttagaatcggtcaggcaatgtgagcacgtttaaagtgagatgtgagcaaatggctaaccaaccttcagcagaagaactcaagaaaaaattgtccgaaatgcaattctacgtgacgcaggatcgtggcacagaaccgccatttaccggacgcctgctacataataaacgcgatggggtttatcactgcctggtctgtgatacgccgctttttcactcccacaccaaatacgattcaggctgcggctggcctagcttttaccagcctgtcagcgaagaggcgattcgttacatagacgatttttctcatggaatgcagcgtgtcgaaattcgttgcggtaactgcgatgcgcatctcggacacgttttcccggacgggccgcagccaaccggtgagcgctattgcgttaactcggcctcgctggccttttctgacgagaaaaacggcgatcaactgaaaggctgaaaaaacgattcagcaaattattccacaggagcggacacatcatgaatcttgatgagatcattaacagcatgacgccggaagtgtatcaacgtttatccaccgccgttgagctgggtaaatggccggatggcgtggcgttgacgccggaacagaaagaaaacagcctgcaactggtgatgctatggcaggcgcggcacaataccgaagcgcaacatatgacgatcgatactcacggtcagatggtgatgaaaagcaagcagcagctcaaagcggatttcggtattacgtcaaagccgattgcgacattgaaaatgcagtaacggcagccggataagaggtagccgccatccggcggtttcattgccaatgcgttgtgcttaccgggcctgctcattgctgtcaggcacaggcccgccatattttacccattaacgcttaatgtccagcgagtccgccaactgtttcgctaactgattattgtcatcggtgccttattcccagaacattgcgccagccagcccgcgctttttaatctgttttgttagaagcgctctccagcctgcgttgagctttgcctggtagcgacgctgacgtgacgtatccggcccaaagatctatgcaatggtctcaccgttgcgtgatgtattgaccggatacgatacctgctccgctacctggcgacagcctggccctgcgtctcttcccagtctgccagcgtatacagcgtcgcgcctgccgacgccatctccataaacgcgtgcgcgctatcctgcgggtgaatattcacgccgcgacagccatcggtgataacgttaacggcatagcccaactctagcgcatccagcaccgtaaattttacgcagtaatcggtcgccaaccccatcacgataagctcggtaacgtcatgctcgcgaagccaggtatcaagggtagttttctgccgatgttcgttgtcaaaaaacgcactgtagctatcaatcagcgggttttcacccttatagatgcaggcgtcaatcgcatgttggttaagcaggggatgtaacgccgcgccgtcggtatgttgaacgcagtgatccggccagagcgtttgcggcagcccgtccagctttccctgactatagggttccgcctgatgctggctggcgaagctgccatgctgcgcgggatgccagtcctggctggccagcaccggaatctgccggggctggcaccagtcaataagagcgttggcgatgtcgatggtgctgtcgccttccgctacagccagcgcgccgccggcgcaaaaatcattttgcaagtcgaccagtaataaggcccggtttgtcattatcttctccttgtcgtcgggattttttaatcatccggcgtcaattcaccacgcaagttttgcgccatcgcgctacgaatcgcctgagtgtccagaccctggcttaacaaataatgcagtttggttaaggtggcttcgacggtcatatcggcaccgccaatcacgccagcgtgcgccagcgcattaccggtagcgtacccgcccatattgactcgccctgacatgcattgcgtcaggttaaccaccacgatgccgcgcgaactggcctctttcagctcctgtaaaaacgctttattttgcggcgcgttgcctacgccataagagcgcagaatcagcgcttttaccggctgacgcagaaagttacgtactacctcggcggaaatccccggataaatcgtcactacgcctatcggctgcggcgtaatagggtgaacgattaattcaccagaaccgtagggcgcgggaggcgtatttaaacggcgaatgtgaattcctgcttccagcaagggcggcagattgggagaggcaaaagcgtcaaacccatccgcatgggctttggtcgtgcgattaccgcggaacagacgattattaaaaaacagcgttacttcattaatagggtagttggcggcgacataaagcgcattcagcaaattaatttgcccgtcggagcgcagctcagccagcggaatttgtgaccctgtcacaatgaccggtttacccagattttccagcatgaaagagagcgccgatgcggtaaacgccatcgtgtcggtgccgtgcagaataacaaaaccgtcatactcatcgtagtgcgctttgatatctgcagcgatatgctgccagtcttccggcgtcatatctgatgaatccatcagcggggcatattcatggatggtaaaatccggcatctccgggcggtggaattccggcatcagcgccagctggcgctgaaggtgcccggacaccgggatataccctttatctgagcgctgcataccgatagtaccgccggtataggcaacgtaaattgatttcttttgcatgataatgttcagtcgtgtcgcgaaggacgtattaatgattatcggatggcggctatgagcagacgccgccatccggtatggctattgatgaagcattagcgaacgttcgcgcaagtcaaacagaacgcataacggttttgcggatcgttaaatgccgccagtttatccccctcggccttcaccgtgttggcggcggaaacgagcggcgccgggagcatcgcctgaatggtctccggcagcatggcgcgtactgatccggtcatactgtccatgaccatatcaaggaccgtcggttcgtcctgatagtaatcaagatgccactgtttcagtttcgccagctccgccgctttggcgacggcgtcgtcaaagtcgccgagactgtccaccagaccattggctttcgcgtcttctccggtccagacatggccttgtgcgattttatcaatttgctccggcgtacgcttacgcgcgtctgccaccagcgtgataaagcgtttgtagccgtactcaatactgagttgcatcatctgctgcacttccggtgacagcgctttggtcatcgaaatatccgccagcggcgaggtggaaacgccgtcgctgtgtacgccaatcgacgacaggctgttttctaccgtattgatgacgccgaagatgccaattgaacccgtcagcgtgctggggctggccacgatatagtttgccggcgtagagatccagtaaccgccggaggccgccataccgcccattgagaccaccaccggtttgccagccgctcttgccgccgccagttcggcgcggataacttcggaggcgttgacgctaccgcctgggctattgacgcgcagcacaatcgctttcactttaggatcaaggcgtgcgtcgcggatctgcgatgccgtagtgtcgccgccgacattccctggcgtttcttcgccatccataatcgcgccattggcgaaaataaccgcaatagtaccgccggtatccgcaggcgttttcagcgaataatcgtaatagctgatcgcgcgatagttattttcggttttgctccagccaaactgcttcgtcagcgctttttcaacatctgcgctggaggcgagggcgtccaccagtttatggtcgagcgcatatttggcggtgtcgccgcccacgctggttaacccgtcgataatagcctgcgcgccggggaagagttgttgcggcgaaatctggcgattggcggaaacggtatgcaggtagttctgccacagttcgcctatccagcggctgtcggcctcgcgggcggcgggcgacatatcgtcgcggataaacggctcgacggcggatttataggtgccgacccggaaaacgtgggtagagactttcagtttatccagcagcgttttgtagtacaggccattcgtagcgaagccgtgaagatctacctgaccctgtggggaaagccaaattttattagcgaaactggcgagataatactgaccctggctgtagttttcacccacggcgaaaaccggtttgccgctgtcgcggaattcgcgcagcgctttaccgatatagcgcattgatggctgatcggcgccggtgaagtttttcagatccagaacgatacccgtgatattacggtcatctttcgcctgacgaatagcgttgacgatgtcaaacagggagttttcctgcagacggtcggagctggcgccaaataactggcgacccagcgcgcccagacgatgattggtggagggtttatccacaatgacgccggaaatatccagcagcagagcgccgcgcgcggtttgctcactgttgctgccgttaccgatctgcatccagatcccaacgcccaccaggaccagaaaaataaagaacaggttgagtaccatttcacggacgaagttcaacactcgccacgtccatttaaaaaatccggcaataaatcgccacagggttcgcatgtattctccctatctgagtaacaacgcttgtaccttggtgaggataaagcattaagatgtggctatcgtaatgacccatcaggcagttgtcagcaggaatcactgcctgcgctgtaacaaaatccgctcccgtgttaattttgtgaataaatatcattgctggagttaatcaaatggatgcactagaactgctggtcaaccgtcgtagcgcctctcgtctcgcagaaccggcgcctgtcggagagcaattacagaacattctgcgggcgggaatgcgtgttcccgatcataaatctctacagccgtggcgtttttttgtgattgaaggagaggggcgcgaccgcttcagcgccgtacttgaacaaggcgctgtcgctgccgggggggatgagaaggcgatcgaaaaagcgcgtaatgcgccgtttcgcgcaccgctgattattaccgtggtggcgaaatgcgaagaaaaccataaggttccggtgtgggaacaggagatgtctgccggatgcgcggtgatggcgatgcaaatggcggcgattgcgcaagggtttaatggtatctggcgtagcggcgcattaacggagagcgctattgtgcgggaagcctttgagtgccgcccgcaggataaaattgttggttttctctatctcggcacgccgcagctcaaagcgtcaacgacgatcagtacccccgaccccacgccgtttgtgcgttatttctgacgctgagggataaaactgtctggattctgagcaaaggcgcggtaattcagacagtgatacttaccacatcagggaatgagcgctaccatagcgcgaatgcaatgacaggagatgtccatgagcgagcaagccattcgtttaacgcaatacagccacggcgctggttgcggttgtaaaatttcccctaaagtgctggagactatcctgcatagcgagcaggcgaagttcgtcgacccgaacctgctggtgggtaatgaaacccgcgatgatgcggcggtttacgatctgggtaatggcaccagtattatcagcaccaccgacttctttatgccgatagtcgacaacccgtttgattttggccgcattgcggcaacaaacgccatcagcgatatttttgcgatgggcggcaaaccgattatggcgatcgcgatccttggctggccgattaataccctgtcgcccgatattgcgcgtgaagtgaccgagggggggcgttttgcctgccgtcaggccggtatcgcgctggcgggcggacactctattgacgccccggagccgatctttggtctcgcggtcacaggcgtagtgccgaccgaacgggtgaagaaaaacagtaccgcgcaggcgggatgcaaactctttctgaccaaaccgttggggattggcgtgttgaccaccgccgagaaaaaatcgctgcttaaacctgaacatcaggggctggcgacggaagtcatgtgtcggatgaacgttgctggcgcggcgtttgccaatatcgacggcgtaaaagctatgactgacgttaccggttttggcctgctggggcacctgagcgagatgtgccagggcgcaggcgtgcaggcgctgctttgctatcaggacatccctaaactgccgggcgtggaagagtatattgctctgggcgccgtaccgggcggcacagagcgcaacttcgccagctatggtcatctgatgggcgacatgtcgcgtgaagttcgtagcctgctgtgcgatccgcaaacgtcaggcggtctgctgttggcggtaacgccggacgccgaagacgatgttaaagccaccgcggcggaatttggtatcgatctgaccgcgattggcgaactggtcgaggcccgcggcggtcgcgctatggttgagattcgttaacctgatgcggttgtttattgccgaaaaaccgagtctggggcgcgccattgcggatgtgctgccaaaaccgcaccgtaaaggcgatggttttattgagtgcggaaacgggcaggtcgtcacctggtgtattggtcatttgctggaacaggcgcagccggatgcgtatgacagccgttatgcgcgctggaatctggctgacctgcctatcgtgccggaaaaatggcagcttcagcctcgtccttccgtcaccaaacagctcaatgtgattaagcgctttttgcatcaagccggtgaaattattcacgccggcgacccggatcgcgaagggcagcttctggttgatgaagtgctggattatctccagcttcctgccgaaaagcgccagcaggtgcggcgttgtctgataaacgaccttaacccgcaggcggtcgagcgtgctattgacaggctgcgggcgaacagcgacttcgtgccgctgtgcgtatccgcgctggcgcgagcgcgagcggactggctgtatggcattaatatgacccgcgcttacacgatcctgggccggaatgccggctatcagggcgtgttatccgtgggacgcgtgcagacgccggtactggggctggtggtgcggcgagacgaagagattgagaacttcgtcgccaaagacttctttgaagtgaaggcgcacatcgttacgcctgccgacgagcgttttaccgctatctggcagccgagcgaggcgtgcgaaccttatcaggatgaagaggggcgcttgcttcatcgtccgctggcggagcatgtagtgaaccgaatcaacggtcagcccgcgctggtaaccagttataatgataaacgggaatcagaatccgcgccgctgccgttttcgctctcgacgctacagattgaagccgccaaacgctttggcctgagcgcgcaaaacgtgcttgatatttgtcagaagctatatgaaacccacaaactgattacctatccgcgttccgactgccgttatctgccggaagaacactttgccggacggcaggcggtcatgaacgcgattagcgtccacgccccggatttactgccgcagcctgtggttaatcctgatacgcgcaatcgctgctgggatgacaaaaaagtggatgcgcaccacgcgattatcccgacggcgcgcagttcttctgtccatttgacggaaaacgaagcgaaagtgtacaccctgattgcgcgtcagtatctgatgcagttctgcccggacgcggtgtttcgtaaatgcgttattgaactggaaatcgccaaagggaaatttgtcgccaaagcgcgttttctggcggaagccggttggcggacgttactgggcagtaaagagcgcgacgaggaaaacgacggtacgccgctgccggttgtcgccaaaggtgatgagttgctgtgtgaaaagggggaagtggtcgaacgccaaacccagccgccgcgtcatttcactgatgcgacattgctttccgcgatgaccggaattgcccgcttcgtgcaggataaagatctgaaaaagatcctgcgcgcgaccgatgggctggggacggaagccacgcgcgccgggattatcgagctgctgttcaaacgtagctttctgaccaaaaaaggtcgctacattcattctaccgatgctggcaaagcgttaatacattcgctgccggagatggcggcccgtccagatatgaccgcgcactgggaatctgttttgacgcaaatcagcgaaaagcagtgccgttaccaggatttcatgcaaccgctggtcggcacgttatatcagctgatcgagcaggctaagcgcacgccggtgaagcgcttcagagggatagtcgcgccaggcggtggagacaagaaaaagagcgcgccgcgtaagcgagcgggcaaaaaaagcccgcctgctgcggagacaggccgtcagaccgaataagcgtaaagctatctggcctgacgacgggattaaatgacgccctgcgccagcatggcgtcggcgactttcacgaaaccggcgatgttggcgccctgaacgtagttggtatgcttattgtcgccgccgtattcgacacaggcgtggtggatatccagcataatgtgatgcagacgggcgtccactttctcggctttccagctcaaccgcgcggcgttctgcgccatttccagccccgatgtcgccacgccgcccgcgttggcggctttacccggcgcaaacagtacgcccgcttcaaggaagagatcggtcgcttcaatcgtggttggcatatttgccccttccgccacggcttttacgccattggcaatcagtacgcgcgcggcgtcaacgtccagttcgttctgcgtcgcgcatggcagggcgatatccaccggtacgctccagggctgctggccttccagataggttaagccaaactcacgggcgtagtcagcgacgcgaccgtcacggctggctttaatttcacacagacgcgccagcttctctggcgtgaagccactttcatcgaccaccgtcccgctcgaatccgacgcggtaaccacgcgcgcgccaaaggccatcgctttctcaatggcgtattgcgctacgttgccggagccggacacggcgacgcgcatcccttcgaaaccgagaccatgacgtttaagcatcgcttcggtaaagtagaccaggccatagcccgtcgcctccgggcgaatcaggctgccgccgaaggaaagccctttgccggtgaagacgcaggagctgttattggaaagcttgcgcatcattcccgccataaagcccacttcgcgcccgcccacgccgatatccccggcaggcacgtcggtatccggccctaaatggcgatacagttcagtcatcagcgcctggcagaaacgcatcacttcgccttcgcttttccctttcggatcgaaatcgctgccgcctttaccgccgcccatcggcaacgtggtgagggcatttttaaaggtttgctcaaagccgaggaacttaaggatggaaaggtttaccgaaggatggaagcgcataccgcctttataggggccgatagcagagttgaactgcacgcgccaggcgcgatttacctgcacctggtttttgtcgtccagccacactacgcgaaactggattacgcgctctggttcaaccaaacgttccagtaaagacatgtggcggtaacgggggttttgttcaagaaacggccacagggtggtcatgacttcacggacggcttgcgcgaactcggtttgatgcgggtcgcgcttttgtacatggttgaggaacgattccagagaacatgtctgatccatagatataaaaacctcttatatattaatgtggttgtatttgcgttttatcagaatatgtatttgcagttttcgactataccatcagcaatgtgacggtaagcaagaaaaaaatgacgctgctaagtaaattcataacggggcgagggtcataactaaaagcgatgacaaaagaggattaaagttttcacggcggcttaccgttatactgagaatatacttagaaaaataaggaaatcctatgcgccgaagcctcgtggtcgccgtgatggcgataatgccaatggtcgggctggcaaaccagaacagtcgtcctgatattcaggtgaatgtcccgccggaagttttcagcacgcgcggtcagtcgtcccagccctgcattcagtgctgcgtttaccaggatcagaattactccgaaggcgcggtaataaaagtggaaggcgtcttgctccagtgccagcgtgacgaaaaaaccatcagcacgaatccgttagtctggcgtcgcgtaaagctataaacgcctgcaatagcggaatatccgccggggcgagggggtactccagcgcctcttccggcgtacaccaggctaatgcctgatgttccagcgcacgtatcagaccgttaaacgcaggcacatgccaggcgtgcaaatgaattcgtcggccagacacgtcgcgttgatggctggcgatatagacgccgggcgtggcgtcaatccctaactcttcgcgtagctcgcggataagcgcctgcggctgggtttcgccgggttcgactttaccgccggcaaactcccataaaccggcttgatccgcatgagctgggcgctgggccagcagaattttgccgtcgcattcaatgatggcggcaacaacatcgagtttttttatcattgtcgttaaggtcgttattcctgccgggaagcgtcgcgctatcccggccttacggttaatcagaaagcggaatcaaacacgaaacgtcgcccagaccggcgcatggtcggagggtttttccatactgcgaatgtcgtagtctataccggtttctgcgcaacgttccgccagcggagcgcttgccagcaagaggtcgatacgcagcccgcgattatccacgaaacctttcgagcggtaatcaaaccacgaaaatttatccatcgtttgcggattcgcctgacggaacgtgtccactaatccccacttcagtaaccgtgacatccattcacgctcctccggcaggaaggagcatttaccggtacgcagccagcgtttgcggttttcttcgccgatgccaatatccagatcggtcgggctgatattcatgtcgcccataattaataccggattatcgcacttgagttccgtttcaagatagttttgcaagttctgataaaactgcgctttcgcggggaacttcaacggatgatcccggctttccccctgcgggaaatagccgttaatgacggtgatattacccagcggcgaggggatttccgccatgataatgcggcgttgcgcctcttcgccatcatccgggaaaccgcgtctgacggaaatgggcgtggcttttgttagcagcgcgacgccgtaatggcccttttgtccatgatagaaaacgttatagcccagcttcgcgacctcttcgagcgggaacatttcgtcgtggacttttgtctcctgtagaccgatcacatcgggctggtgtttttcgacaatcgcttcaagctgatggggacgggcgcgcaggccgttgatattaaaagagacaaatttcatagtcactgccactttgcaaggtgaatcgtgttgggatggtaacagaaattttaccgggtgactgccactcatcgtcagattcggccaatggaagcgtatggtgttttctatagcgcgaaaatggcacggtttgcgtgcagatgcgccagaacggggcggtaatttccagtaaatttcgtataagatcacaattccagaattatatttggcaactgaataatatttcgctttttcctctttttagccaccgattatgcggaaatattcacttttcatgcagtaaaagtgaatatcgctacgctgtaacccattgatttaccgtttatcacctctgtttatgcaatgttaacgctggctggcacgaatgctgcaatctacatttacagcgcaaacactcatattaattaacatataaataactttatttttaccaaaagaggtcgctatgtctctgtcagttacgcgcgaaaactttgatgaatggatggtgccggtatacgttcccgcgccttttattcctgtacgcggagaaggctcacgcctgtgggatcagcaggggaaagagtatattgattttgctggtgggatcgcggtcaacgccttgggacatgcgcatccggcgctgcgcgaggcgttaaatgaacaggcgaatcgcttctggcatatcgggaacggttacaccaatgaaccggcgctgcgactggcgaaaaaactgatcgacgcgaccttcgccgaacgcgttttcttttgtaattcaggcgctgaagcaaatgaagctgcattaaaactggcgcgcaaatatgcccacgatcgtgtcggcaaccataaaagcggcattgtggcctttaaaaacgcgttccatggccgcacgctctttaccgtcagcgctggcggtcaacccacctattcacaggactttgcgccgctgccgccggatattcgtcatgcagcctataacgatctgaactccgccagcgcgctcattgatgacaatacctgcgccgtgatcgtagaaccggtgcagggcgagggcggcgtgatccccgccacgaaagcttttttgcaggggctgcgtgaattgtgcgaccggcatcaggcgttactgatttttgatgaggtgcagacgggcgtcggacgtaccggcgaactgtatgcatatatgcattatggcgttacgcccgatatcctgacgaccgctaaagcgttgggcggcggcttcccgatcggcgcgatgctgaccacgcaagactatgccagcgtcatgacgccaggcacgcatggcaccacctacggcggtaatccgctggcgacggcagttgccggaaaagtactggatatcatcaatacgccggagatgcaaaacggcgtcagacagcgccacgatgcgtttattgaacgtctaaatacccttaatgtgcgttttggcatgttcagtgaaattcgcgggctggggctactgcttggctgtgtgctacagacggagtttgccggaaaagccaaactcatcgcccaggaagcggcaaaagcaggcgtgatggtgctcattgccggtggcgacgtggtgcgttttgcgccagcgttaaatgtgagcgacgaggagatagccaccgggcttgatcgttttgccctggcgtgcgaacgccttcagacgggaggcgtaccatgcgggtgattcgtcctgtcgaacatgcggatatcgccgcgctgatgcagcttgcaggcaaaacgggcggcggcttaacctcgctaccggcaaatgaagcgacgctggcggcccgcattgaacgcgcgctaaaaacctggtccggcgagctgccaaaaggcgaacaagggtatgtattcgttctcgaggacagtgaaacgggtgaggtcggcgggatctgcgccattgaggtcgcggtcggccttaatgacccctggtataactatcgtgtcggtacgctggttcatgcctccaaagagctgaatgtatataacgcgttgccaacattattcctgagtaatgatcacactggcagcagtgagctttgcacgctgtttctcgatcccgaatggcgtaaagagggtaacggctacctgttgtcaaaatcgcgctttatgtttatggccgcgtttcgcgataaattcaatgagaaagtggtggcggaaatgcgcggcgtcattgacgagcacggttattctcccttctggcaaagtctcggcaaacgctttttttctatggatttcagccgggcggattttttatgcggtaccgggcaaaaagcgtttatcgccgagctgatgcccaaacatcctatttatacccacttcttatctgaagaggcacaggccgtgattggcgaagtccacccgcaaacggcgccagcccgcgcggtgctggaaaaggaaggctttcgctatcgccactatatcgacatcttcgacggtgggccgacgctggagtgtgatattgaccgggtgcgggctattcgtaaaagccgactggttgaagtcgcggaagggcaacccgcgcctggcgactatccggcatgtctggtcgccaatgaaaactatcaccactttcgggccgcgctggtgcgtgccgatccgcagacttcacgacttgtacttaccgcagcgcagttggatgcactgaaatgtcgcgcgggcgaccacgttcggctggtacgcctttgtgctgaggagaaaaccgtatgacgctatggataaacggcgactggataaccggtcagggcgaacgccgccgcaaaacgaacccggtgagcgcggagatactttggcaggggaatgacgctaatgcggcacaggtcgccgaggcctgtcaggcggcgcgcgcggcgtttcctcgctgggccagacagccttttgccgcacgacaggctatcgtagagaaatttgccgccctgctggaggcacataaagccgagctcacggaggtcatcgcacgtgaaaccggtaaaccgcgctgggaggcggcgacggaagtgacggcgatgatcaataagattgccatctcgattaaggcttaccacgccagaacaggcgcacaaaaaagcgaacttgtcgatggcgccgcgacgttgcgccatcgtcctcacggtgtgctggcggtattcggcccttataactttcccggccatttaccgaatggccatattgtgcccgcgttgctggcaggcaatacgctgatcttcaaacctagcgagctaacgccatggaccggggaaacggtaataaaactctgggaacgggcggggctaccggcaggcgttcttaatctggtgcagggcggccgggagaccggacaagcgctgagttcgctcgacgatctcgacggactgctgtttaccggcagcgccagtaccggatatcagcttcatcgccagctatccggccagccggaaaaaatcctggcccttgaaatgggcggaaacaacccgctcattattgaggatgcggcaaatatagatgcggcggtacatctgacgctgcaatcggcgtttattaccgccggacagcgctgtacctgcgcgcgacgccttctggtaaaacagggtgcgcagggagatgcatttctggcgcggctggttgacgtcgccggacgtctgcagcccggcagatgggacgacgatccgcagccgtttatcggcggactgatttcagcgcaggcggcacagcatgtgatggaggcctggcgtcaacgagaggcattaggcggtcgcacgctactggcgccgcggaaggtcaaagagggaacctctctgctgacgcctggcatcattgagctgacgggcgtcgcggatgtgccggatgaagaggtgtttggtccgctgctgaacgtctggcgttatgcgcatttcgatgaggcgattcgtctggcgaataatacccgttttggtctgtcgtgtgggctggtgtcgacggatcgcgcgcagttcgaacagctcttgctggaggcgcgggcagggatcgttaactggaataaaccgctcaccggggcagcgagtactgcgccgtttggtggtgtcggcgcgtctggtaaccatcggcccagcgcctggtatgccgccgattattgcgcctggccgatggccagtctggaatctcccgaactaacgttgcctgcgacattaagccccggcctcgacttttctcgcagggaggcggtatgacggcgcatgaagttaattttgacgggctggtggggcttacgcaccattatgccgggctatccttcggcaatgaggcatcgacccgccaccgttttcaggtgtcgaatcctcgtctggcggtaaaacaggggctgctaaagatgaaagctctggcggatgccggctttccccaggcggtgatcccgccgcatgagcgaccttttattccggcgttgcgtcagctcggcttcacgggtagcgatgagcagattctggataaggttgcgcgtcaggcgccacgctggctttccagcgtgagttccgcgtcgccaatgtgggttgcgaatgcggcgacggtttgcccatcggcagacgcgctggacgggaaagttcacctgacggtggcgaatttaaacaataaatttcatcgcgctcttgaggcgcctgttaccgaagcgctgctacgcgccatatttcgcgatgaaagccagttttcagtgcatagcgcgttaccgcaggtcgcattattgggagatgaaggcgcggcgaatcataaccgtcttggcggcgagtatggttcggcaggcgtgcagctttttgtctatgggcgcgaagaggagaatgaaatacgacccgctcgttatccggcgcgccagagccgcgaagccagcgaggccgtggcgcgtcttaatcaggtgaatccgcaacaggttatcttcgctcagcagaacccggaggtcatcgatcaaggcgtattccataatgatgtcatcgccgtttcgaatcgacaggtattgttttgtcacgaagcggcgtttgcccggcagaaagtgctcattaatcagttgcgtacgcgcgttgacggttttatggcgatagaggtgcccgccggcgaggtttctgtatcagatgctgtggcgacctacctgtttaatagtcagttgctaagccgtaacgacggctcaatgctgttagtgttgccgcgggaatgtcaggaccatgtcggcgtctggcgctatctgaataagctggtggcggaggataaccccatcagcgcgatgcaggtgtttgatttgcgagaaagtatggccaacggcggcggcccggcctgtctgcgattacgcgtggtgttaacagaagaagaacgaagggcggtgaatccagcggtaatgatgaatgacgctctgtttacggcccttaacgcgtgggcggatcgttattatcgcgatcgcctgaccgctgccgatctggccgatccgttattattgcgagaaggccgggaggcgctggatgtgttaacgcgtctgctggatttggggtcggtttatcctttccagcaaacgggggcggctgatggataactttctggcgttgacgctaagcggcacgacaccgcgggtgacgcaggggaagggcgcgggttttcgctggcgctggttaggccatggtctgcttgaactcacgcccgatgcgccggtcgaccgcgcgttaattctttctgcggggatacacggtaatgaaaccgcgccggtcgagatgctggataagctgctgtcggcgctgtattcaggcagcttgacgttaacgtggcgagtgctggtggtactcggcaatccgcaggcgctggcggcgggaatacgctattgtcacagcgatatgaaccgtatgtttggcgggcgttggcagtcctttgccgaaagcgatgaaacgcggcgggcgcgtgagctggagctaagtctggagaccttcttttcatctggccaggcgcgggtacgctggcatctggatctgcataccgccattcgtggctcgcatcatttgcgttttggcgtattgccgcagcgcgaccgcccgtgggagacagattttctggcgtggctgggcgcggcaggactagaggcgttggtatttcatcaggcgcccggcggtacgtttacgcactttagctctgaacatttcggcgcgctttcctgtacgctggagttgggaaaggcgttgccgtttaggcaaaacgatctgacgcagttcaacgtaacctcgcaggcgttgtcggcgttgctgagcggtgtcgaaacgtcaacctcgttttcgccgccgctacgctatcgggtggtgtcgcaaatcacgcgtcacagcgacaagttcgcgctttatatggatgcgcaaacgctgaattttactgcctttgcgaagggaacgttgctggccgaggagggggataagcgcgtgacggtgacgcatgacgttgaatatgttctctttcctaatccctctgtcgcctgcggattgcgggctggattaatgctggaaagactgccctgataaatgtccctgtaagctcacgttaggattacagggatgatttgggacacagtttcatgctattacggattattcctggagaattgctttattaataagcgttgctgcgttatagttctgcataatttctgctatatcatgctgttgtatatttctctttcaactctgcgcaatttattctttttttcttcacaattggcgaaaaagtgttttttatactttcattgttttaccgttgttatgactaattgacgctaagacggttaaagttaatcacgacaacacggcgctgttttaaatatgccgtaaaaataactgaaaggaaggatagaaatatgcgtaaactgactgctctatttgttgcctctaccctggcgatgggtgctgcgaatctcgctcatgccgctgagactaccaccgccgcgccagcggatgcgaagccaatgatgcagcataaaggtaaatttggcccacatcacgatatgatgtttaaaaacctgaacctgacggacgcacagaagcaacaaattcgcgacattatgaaagcgcagcgcgagcaaatgaaacgtccgctgctggaagagcgtcgcgccatgcatgatattatcgccagcgataccttcgataaagccaaagccgaagcgcaaattacgaaaatggaagcgcagcgcaaggccaatatgctggcgcatatggaaacccagaataaaatttataacgttctgacgccggagcagaaaaagcaatataacgctaattttgagaagcgtctgacggaacgcccggcgcaagaaggtaaaatgcctgctgcggcagaataactttccgcataatttaagaccgccggtcttgtcgacaacacaatcgttgaggtggacaggatcggcggttttctttatgactggcgacagtcggtgtgcagttcaatgatctcatattgacctgacattaacggtttacagagaatcttatagccgtcctgatcaaaacccgcaggtgtgcgcaccagggtggcggcctcatccagcgagggtaccgcccccagccataaccaattgttgataatgtggaactgggtcatttgtgggcggctctcttttaacgcgatagcgcctttccagggccagcaaaccacacgtaaccgttccagcgaggcctgcagacgaagaaaatgcgcctgcggggtttcttgcccacaacacgcgccagcgcagcgcttcagagcgaaacgaaaacaggcgcgcccacggcttaccggttcaagccccagcaggccataacacaatttttgttcatcggcgaggttctgtaagctttgcagcgccgcccgacggttggcgaagaggccaaacaggtttggctcatgggaaaaatcgacgctgcgggcggaaacgacctcaatcttttgttcgctcaactggagagagcaaagctggcgattacgccgtaaccgcttgttaaacagcggctgttgttctttgatcagccgcgcctccagcagcaacgcgcccatttccccagcggtgcagatccagcttatccgccgcgcctgtcgcagcatagtggcctcgtcaggcgttcgcagatgtgaaagcacccggctgcgaatattcacgcttttaccgatataaagcggcagcgtatcgctttcgctatgaaatatatagacgcccggtaaggctggcgcttcgctgaggaaaggacgtaaatgttctggatattcgtaaatggccgccgcttcaaactcaaggcggggggctgattgacgccgtaccacagtgatctccgttaactggttattcatccagtataacagcggatgggtgattaaaaaagaggctgggaagagaggaggccggatagacgagcgatatccggcacaacagtagaagtacgcttaccttttccaaaagtcgtcgaataccgtaatcggtaaacggcgcttatgttcagtttttacataccagccttcgatagttttagcgatggcggggtccagcgttttgccttccaggtaatcgtcaatattgtcatacgttacgcccagcgcggcttcatcaggcagtgaagggcggtcgtcttccaaatcggcggtggggacttttttatacagatgctcaggacagcccagcgctgcgagaagctgtttgccctggcgtttgttaaggcgatgaagcgggttaatatcggtaccgccgtcgccatatttggtgaagaacccggttatcgcttccgccgcatggtcggtgcccaccacgacgccgtgagtcataccggcgatgctatattgcgctttcattcgctcacgcgctttttcattgccgcgaacaaaatcgctcagctcaattcccgcttcgcgcagcgcctgttcgctggcgaggacggcgcctttaatattgacggtgagtactctgtccggctgaataaaagcaatggcgtcctggcaatcctgttcatcagcctgtacgccataaggcagacgaacggcgataaactgcagcgcattatcaccggtctcttctcgcaattcggcgatagccatctggctgagtttcccggccagcgtcgaatcctgcccgccgctgatgcctaacaccagcgatttcaaaaagggataggttttcaggtacgctttaagaaaatccacgctgcggcgaatttcttcttcagggttgatatgcggtttcgcgccaagcgcctggattatctcttgctgcagagtcatttaacccccttcgacattaaaaaaatgaatctttaccctgttaaagctaacccttcgccgctgaaacaacaaggtttggcgggctaagcggtgtttaaaacaacatgtcgctgcgttagagaattttccgaaagactttttgtggcgaggcgcggcttgaaaaatgttctgatgtattccaggcttacataacacgctgataaacaagaggacggaaaatgaacaagaacgtagcaggaattttaagcgcagcggcggtaatgactatgctggcaggttgtacggcgtatgatcgtacaaaagaccaatttgttgagcctgtcgttaaagatgttaaaaaaggaatgagcagggcgcaagttgcgcagattgcgggcaaaccgtcatctgaagtgagtatgattcatgcgcgcggtacctgtcagacctacatcctgggtcaacgtgatggtaaagcggaaacctactttgttgcgctggatgataccgggcacgtgattaactccggctaccagacctgtgcggagtacgacactgacccacaggcgccgaagcagtaacaactgtacattgcctgaacattcaaggaaaccggcctgcgagccggtttttttgtgcctgccataaccttatttattatcgcgaattatttgcccgaaatgtgaggggggtcataacgccaggtcaatgagagacaatttagtgggtcaaggaaataccatccggtggtccgatcccgtatactcatttcagccacctaaaaaagtaaatccggttacgcaagtcgcccagagtatggatgcaggttgaggcttgcggcgtatctggttgacagataatcgcacatgaggaaggtttttatggaaaagaaacacatttatctgttttgttctgcgggcatgtcaacatcgttactggtatcaaaaatgcgcgctcaggctgaaaaatatgaagtgccggtgattattgaagcattccctgaaaccctggccggtgaaaaaggcccggcagcggacgtcgtgttattaggcccgcaaattgcttatatgctccccgaaattcagcgtttattacctggtaaaccggtagaagtcattgattcaatgttgtacggcaaggtagatggcttaggcgtgcttaaagctgcggtagcggcaattaaaaaagccgccgcgaattaattattttttaatttttcccgtcaaagagttatttcatacactaaccgcaatattttattgcggtatttaagggtatttttctatgagtaacgttattgcttcacttgaaaaggtactccttccttttgctgtaaaaataggaaagcagccacacgttaatgcaatcaagaacggctttattcgtttaatgccattaacccttgcgggggcgatgtttgtattaattaataacgttttcctgagctttggggaggggtcgtttttttattccatgggcattcggcttgatgcctcaaccattgaaacacttaatggattgaaaggcatcggcgggaacgtctataacggcacattgggcattatgtcgctcatggcgccattttttatcggcatggcgctggcggaagagcgcaaggttgatgcgctggccgccggattgctttccgtggcggcatttatgaccgtaacgccgtatagtgtcggcgaggcctatgccgtaggcgctaactggctgggtggtgcaaatattatctccggtattattattggcctggtggtcgcggagatgtttacatttattgtccggcgcaactgggtgattaagctaccggacagcgtaccggcttcggtgtctcgttcattctcagcattaattcccggctttattattctctctattatggggattatttcctgggcgctgtctaattacggttctaacttccatcagattattatggacactatctctacgccgctggcatcgctgggtagcgtggtagggtgggcatatgtcatttttgtaccgctgctgtggttctttggtattcatggttcgctggcgctgaccgcgctggacagcggcatcatgacgccctgggcgctggaaaacatctctatttaccagcagtatggctccgtcgatgcggcgctggaagccggtaaaacgttccatatctgggcgaaaccgatgctggattcttatatcttcctcggtggtagcggcgcaacgctgggtctgatcatcgctatcttcctggcatcccgtcgcgcggactatcgccaggtggcaaaactggcgctgccgtcaggtatcttccagattaacgaacccatcctgtttggcctgccgattattatgaacccggtgatgtttatccccttcattctggttcagccgattctggcggcgattacgctggtggcttactatttgggtattattccgccgattaccaatattgcgccgtggaccatgccaaccgggttgggggcgttctttaacaccaacggcagtgtcgccgcgttgctggttgcgctatttaacctggcggtcgctaccctgatttatctccccttcgtggtggtggctaacaaagcgcagaacgccatcgagcaggaagaaagcgaagaagatatcgctaacgcactgaaattctaaactccgcgccggcatgggatgccatgccgggctgaatcagaggaaagactatgtttgatcttgaaaatgttgtagataaccagaccgcggctgaggaactcgaagaagtcgttatggggcttatcatcaattctggtcaggcgcgcagcctggcatatggcgcgctcagaaaagcgaaagaaggcgattttgaggcggcgaaagcgatgatggaccagtcgcgcatagcgctcaatgaagcgcatcttgtgcagacaaaactcatcgaaggcgatcagggcgaaggcaaaatgaaagtcagtctggtcctggttcacgctcaggatcatttgatgacatcaatgctggctcgtgaactgatcgccgagttgattgagctccatgagaaactgaaataacagggggcggatgatgcagctacaggttaacgcaacggaaatcaaaacggtttatgagcagcagctcttcaatggcaaaaatttccatgtgtttatctataacaagacggaaagcgtcaccgggctgcatcagcacgactactatgaatttaccctggtattaaccggacgttattaccaggagattaacgggaagcgtgtgctgctggaacgtggagattttgtttttatcccggtggggtcgaatcaccaaagtttctatgagtttggcgcaacgcgtattctgaacgtaggaattagtaaacgtttttttgaacagcattatcttccgttactgccgttttgttttgtggcatcgcaggtatacagggcgaatagcactttccttacctatattgaaacggtgattgcgtcgttgaattttcgcggcaatgggctcgacgaatttatcgaagtggtgacattttatattataaaccgcttacgtcattaccgcgaagagcaggtttatgatgatattccacaatggctgaaagcaaccgtggagataatgcatgataaaacgcagtttggcgaacatgcgctggaaaatatggtgcgcctgtcggcaaaatcccaggagtatctgacgcgcgccacccgacgttattacagcaaaacgccgatgcaaatcattaatgagattcgcattaattttgccaagaaacagttggaaatgaccaactattcggttacggatattgcttatgaagccgggtatagcagtccaagtctgtttattaaaacgtttaagaagatgacctcatttacgccgaatagttatcggaagcgattgacggaaattaatgagtaacggtttgcattgctcgattaattacatttcacgcttgccccaatagcgcggggaacgtcacgctatttcttacgagcgggcatagcgtaatacatatcagtgttatacactgaagggagatattatgagccagaaattaaaagtcgtcactattggtggcgggagcagctacacccctgaattacttgaaggctttattaagcgctaccatgaattacctgtcaccgaattatggctggttgacgttgaagacgggaaagagaagctgggcattatttatgatctctgccagcgaatgattgataaagcaggcgttccgctaaaattgtataaaacgctggatcgccgggaagcgctgaaaggcgctaattttgtcactacccagctacgcgttggtcaactcaaagcccgtgagctggacgagcgtatcccgcttagccacggctatctggggcaagaaaccaacggcgctggcggtttatttaaagggttgcgtaccattccggttatttttgacatcattaaggatgttgaagaattatgtccgaatgcgtgggtcattaactttactaacccggcggggatggtgacggaagcggtttatcgtcataccaactttaaaaaattcatcggcgtatgtaatattcctgtcggcatgaaaatgtttattcatgacgtgctggcgctgaatgagaatgacgatctttccattgacctgtttggtctaaaccatatggtctttattaaagatgtgctggtgaatggcacctcacggttcgcagaattactggatggcgtggcgtccggtcagttgaaagcgtcaaccgtaaaaaatatctttgatctgccgtttagtgaaggattgattcgctcgctgaacatgctgccgtgctcttatttgttgtattacttcaagcaaaaagagatgttggcgattgaaatgggcgaatattacaaaggcggcgcgcgcgctcaggtcgtacagaaagtggagaaacaactcttcgacttgtacaaaaatcctgagctaaacgtgaagccgaaagagcttgagcaacgcggcggcgcttattattccgatgccgcttgtgaagtcattaacgctatttataatgacaagcagactgagcattacgttaatattccacatcatgggcatgtcgagaatatcccggcggactgggcggtggaaatgacctgcattctgggacgcaatggcgcgacgccgcacccgcgtatcacccgttttgacgaaaaagtgctggggcttatccacactattaaaggatttgaggtcgcggccagcaatgcggcgctgagcggaaactttaatgatgttctgctggcgcttaacctgagtccgctggtgcattccgaccgcgacgcagaagtcctggcgcgtgaactcattctggcgcatgaaaaatggctgcctaattttgccgcttgcatcgaagcgcttaaaggtaagcaccactgacagaggtaggctatggaacgcgtgttgattgtgaatgccgatgattttggcctgagtaaagggcaaaattacggcattgttgaagcatatcgcaacggcgttgtgacctccacgacggcgctggtcaatggcgaggctattgaccatgcggcgcagcttagccgcgagctgcctgcgcttggggtgggaatgcattttgttttgacgttaggcaaaccggtgtcagagatgccgggcctgacgcgagacggcctgttggggaaatggatctggcaaatggcggaggaggatacgcttccgctggatgaaattgcgcatgaactggcgtgtcagtatcagcgtttcatcgacgtatttggcagcgagccaacgcatctcgacagtcaccatcatgtgcatatgttcccgcaaattttccccatcgtcgcccgctttgcggcgcagcgcgggattgcgttacgtattgaccgccagacggtgttgaacgccgacgatctgccgtcggatttgcgcagcactcaaggatttagtagtgaattttacggcgaggagatcaccgaagcgtgctttttacgcattctggatgcctcggcgcatcgaggagaggcctcgctggaggtgatgtgtcatccggcgtttgtggacaacattattcgccagagcgcctattgttacccccgcttaactgaactggaggtgttgacgtctgcgtcactcaaggcagcgattgcggaacgtggatatcgtcctggcagttttcttgatatttagctcctgagtttgcggcgcaagaatgcgccgcattttttgctgtttatgcaggaatcgcgttaattttccccgcacgcgaccagacacggtgtgccgccatcagcgtcagcagagtgtccataaagtggtggtcaacgttatctgcctcaacaagtccttcttccccctggctatcaatgtttaaaagcgccttaaaccgtcgggcgtcgcctgccagtgcgatgggcttcagatgtttgtaggcttccagaaggtagtaacgggcatcgccgcaactctcgatatcggcaatattgccgcacggtactattaccgcatcgaccgttagcgacggcgcgccggcaaaggttgccgcaatcgttaatgttgaaccatcatcagccgttacttcacccatccgtgaatagagcagttttgcgtggacgcctttggcttttaaagcctgcaaaatggtcaacagttcggcggcgttaactttgtcgttcagcagaatagcgaccactcggcctttaacatcgccgtccggcaccgcatacaggctgagcgccggatcttttttcagaccgttgacatcaggaggcggggcaatttgcgtttgctcatgggtgagtgcaaaaccgagattatgcgcgacgccctgagccagcgtgacatcaatatgcgctaactgatcgaccacccgctcccgaatatacgcgcgggcgactttacccagttcaaagctgaacgcgtcaataatatgctgctgttctatcggcgtctgactgagccagaacaggcgaggatgcgagtaatattcaccgaaagaggggctgcgttcgcggattttattgccatccacgcgttcctggtatgattcgaagccgccgcgttttggcgctggcggcgtttcgcgtggccagttgtcattaatggagtttggttcatagttcgccggattggtgtcgatatccatccggtgcataccgtcacgctggaagttatggtaggggcaggtagggcggttaatcggaatttcgtggaagtttggcccgcccagacgactgatttgcgtgtcggtataagagaacagacgcccctgtaacagcggatcgttggtaaaatcaatgccgggaacaatatgtcctggatgaaatgccgcctgttcgttttcagcgaaaaagttatccggattacggtttaacaccattttgccgacgcgttgtactggcaccaactcttccggaatcagtttggtcggatcgagcagatcaaaatcgaatttaaattcatcctcttcggcaatgagttgtaggcccagctcgtattccgggaaatcgcccgcttcgatggcctcccacagatcccggcggtgaaaatccggatcgcgaccggtcagtttttgtgactcatcccataccagcgaggctttacctgccaacggtttccagtggaaacggacaaaggtcgctttcccttgtgcattgatcagacggaaggtgtgaatgccgaacccttccatcgtccgataactgcgtggaataccgcgatccgacattgcccacatgacgttgtgcagcgtctcaggctgtaaggaaacatagtcccagaaggtgtcgtgcgcactctgcccttgcggaatagcccaatgtggttcgggcttaacggcgtgcacaaaatccggaaacttatgcgcatcctggataaaaaagatcggcgtgttattaccgacgagatcgaaaattccctcttcggtataaaatttggtcgcaaaaccgcggatatcacgtacggtatcagcagaccccgcgccgccctgtactgtcgaaaagcgaacaaagaccggggtaattttctgtggatcgcacagaaacgcggctttcgtgatgtcgctcaggtctttatatggctggaaatagccgtgcgctgcagatccgcgggcgtgaacgatcctctccgggatgcgctcatggtcaaagtgggtaattttctcgcgcaggataaaatcttccaacagcgtagggccgcggctgccggcgcgaagagaattttgatcgtcggcgatgcgcacgccctgattggtggtcagcgcataattttcgctgcctttacgaaaggcgtcgagggcagtgagcttatcattcgcggtctcgggcgcttttaagctgccgggggccgtcggttgcgcgcccggcggcgtcgtttctggcgtggggcgatgtgaaccgtctgacggcgccagggagtccaggccgggctgtgattcacgggtatcatgcacgggggactgatggggggatttctcattatgcgacattgaactcgtctcctgctttcatcactgaaatgggcgtggtagtagtcaaaatcactctaactatagaacatttcagcaattatgctgggggagagcggaacggcagacagggtataacagggaaatcgcacgcgcggaacaggacgtcgggggcgaagatcggctaaaatagtgtttttctgatttttagccttagagcctatcccagtaggcgttattggcgcagccagtttggacacggacagcgcgcaaaaaccggagcgtacacgtagtacgtgaggattttgagcactgcccaggaccaaaatggcaagtaaaatagccctaatgggataggctcttagcctcttttagtgaagcattaatgatgaaacctcttcgccagcaaaatcgccagattattagctatattccgcgtgttgaacccgcgccgccggaacatgcgataaaaatggatacgtttcgcgacgtctggatactgcgcggtaaatatgttgcctttgttctgacgggggagtcatttcaacggtcgcccgcctttagcgtgccagaatcggcgcaacgttgggcgaatcaggttcgccaggaaaacgaaatcgctgactaagaaaaaacaaaacgccggtactggagaccggcgtttttagtgacagacattttgagttgccgatcgtcatgtctcagacgatgtgaacgcccgataatgtattatcgatgcgccagttcagcgtcttcttcgctatcgagaatggttttatcggtctgcttcagccactggctggtcagcgtaccagcggtcattgagccactcacgttcagcgcggtacggcccatatcaatcaacggttcgacggagattaacagcgcgaccagcgtgaccggtaagcccatggcaggcagcacaatcagcgcggcgaaggtcgcgccgccgccaacgccggcaacacccgccgaacttacagtaacgatacccaccagcgtggctatccatacggggtctaaggggttgatgccgaccgtcggcgcaaccattaccgccaacatcgcaggataaagaccggcacaaccgttttggccgatggtcgcgccaaaagaggcagcaaagctggcgatggactccggcacgcccaggcggcgggtttgcgcttcgacattaagtggaatggaggcggcgctggagcggctggtaaaggcaaatgtcagcaccggccacaccttgcggaaatatttcagcgggctaatcccgttcacgcccaatagtatgccgtgaaccacaaacattatcgccagaccaagatatgacgctaccacgaagcttccaagcttaataatgtcctgcagattggagccggcaaccactttcgtcatcagcgccagtacgccgtaaggcgtaagttgcatcaccagacgcaccagcttcatcacccagctttgcagggtatcgatagcaacaagcacacgctcgccttttggcgcatcatctttcagcagtttaagcgcggccacgcccaggaatgcggcgaaaatcaccacgctgataatagacgtaggatttgcgccagtcagatccgcaaacggatttttcggtacaaaagacagcaccagttgcggcacgctgagatcggccactttgccgacatagctcgtctcaatggcattcagacgcgcggtttccgcgccgccctgaaccagaccttccgccgtcagtccgaacagattggtgaccagcacgcccaccagcgctgcgataagggtagtaaacagcagcgtgccgatagtcagaaaactgattttccccaattgagaggcgttatgcagtcgtgccacggcgcttaaaatagaggcgaataccagcggcatcacaatcatttgtagcaattgcacatagccgttgccgacaatattgaaccactgaatggagtcttttaacacctgactgtcagcgccataaatggtgtgcagggccagaccaaagaccacgcccatcacaaggccgacaagcacttttttagccagactccactgtttatgacgggcctgcgccagtacaaacagcagaatgacgaacaccgcaatgttcgcaattaatggaaaattcatccccgttctcctgatttttttattatgaagcgctgtgttttagcgattctgttcgcgcaagattagcagaactgtgagctggctcttatattcaaatggaatggtttataccaaaaatgattttggcgttgatttactaatcaatctggtgatttataaaacgattgaactgcatttgcaggatagtaatcatctgcgaagaccagcgtatgacgttgttttccggcatggactgtggcatccacaccgcccaggcaaacaacgccatgcataaaaatcgctccagttgattgcctttgcgcggcgccagaataggcaggcggaaacgccagcggcacggccacagtaagggaacgcctgcgggggtgagcatatccgcgacgatatggcttaaatagccaagtaccatgccttgcagcgcatccgccgggataatccacgtatccggtaccttgagataaaaggtcgccagtagggcaaagaccgccagcagactatgggtaaacccccggtgaccgaacgcgcgggcgatcggtttcgatacccatttcaggcgctgaccaagaaaagatttggggtggtcgatatccggcagcagacaggtcaaaatagccgaaggaataatatgccaccagtcgccgtgcgcaaggacgggcgttaactcggcattcttggcgaaaaccgcgctggctatagaaaaaagaagatgtccttccgccgtcatgataaaacccattaaactgtcaattcatacagtatagggtttttatacagtaggcggaagtggtgacgttgtaactctttgtctctgtcaaagccgcttgccgtctggctcagcggctaattgcccgttgactttgtttcggaaacatcttaaccgagtagatgcgccgccgtcagctctgtcagtgagttaagtttgacattcgccagcgcaaagcgcggatcaggctggttttcttctgctggcaccacaatggcgcgcattcgcgccgcctttgccgcgattaaaccattcaccgaatcctccagcgccacgcaggttaatggatcaacgcctaatttggccgcacaatccagatagacctgcgggtgcggtttgctgtagggcaatttttctgcagaagccagcgcgtcaaaactgtcgcgcagttcaaacatggtgagcactttttccagcatatgcagcggcgatgccgaggcaagccccactaatagcccctgcgctttacacagcgccacagcttcgcgcacacccggcaaaagagggcgcgtctcttcgataagcgtaatcgcgcgggcaataacacggtttgtcacttcctggcgatcggggccgttccacggttgctgcgcaaaccagagatcgacaaccatatcaatgcgtagcccaagcgtgtctggcagctcatggcgccgagtaatatctacgcctaaacttgccatcacgtccagttcagcgcgatcccagagcggttcggaatcgatcagtagtccatccatatcgaaaattgcagcaagaatttgacgtggggttgacatcacaacctctcctgttgagattaaaaaataacgaattaagcgttcattatgaccatgttcttagtatatcgcccttaaagatcaggcgaaaacgggaatcaacaggtagacttaggccaaaacgacgcgtctttatcaaggggaactcatgacgtatcaacaagctggacgcattgcaatcctaaaaagagttgttgggtgggttatttttattccggcactgctttccacgctcatctcagtccttaaatttatgtatgcgcacagtgaaaagcaggaggggataaatgcggtaatgctggattttacccacgtaatgatagacatgatgcgcgtgaatacgccgtttctgaatgttttttggtacaactcgccgacgccgaattttcagggaagcctgaatatcggtttctggctcatttttattctgatttttgtcgggctggcgatgcaggattccggcgccagaatgagccgccagtcacgttttttgcgtgaaggcgtggaagatcagttgatcctggaaaaagcaaaaggcgcggaagggctaacgcgtgagcagatagagtcacgtatcgtggtgccgcaccataccatctttttacagtttttcccgctctatattttgccggtcattattatcgtgctcggctactttttcttttccttgttaggcttcatgtaaactgaaaaatgccggatagcccgtatccggcatgggctgtacctataccgcaagcagccgatccatcgctttttgcgcagtagccaggtgctgaccgccaaacagccttgcccgattaagcagggtgtagagctggtaaatcggctgcctgtcgagaaaatccagcggtagcggcgaaacggactgatagccgtcataaatctgcggtggctgatcggtatgcagcggcagcatcgccagatcgcattctctgtcgccccaatagcaggctggatcgaagatataggggccgtcagggccaagcgcgcagttcgccgaccatagatcgccatgcaaaagagaaggctgcggttgatgcgacgccagacgttgctgaacatgttcaacaatggcgtcaatattaccaaaagtaatgcctttttccgcagcgagttcaagctgccagccaatgcgctgttcggcgaaaaaagtcgaccaacggcgttgccaggtattcggctgcggcgtggtagagagcgcgttatcaaaatcgaggccgaattgaggttggtcgctccattggtgcaggcgcgccagctgttgcccaagaataaacgcattatgggcatccagcgggcggggcgagaggtagtccatgactaaaaagctgtaatcccgatccgaacctaccgcccataccttaggcacaacaacggttttactgcgggagagcagctccagctgatcggcttctgcggtaaaaccgcggagcatttctcgttcatcgcacttcacgaaaaaatcatggcctgcataacgtaaatgccatgcggcatgaacttctccgcctggcagttcattacgcagttcgatttcgccttcaccgacttgctcgcttaaaagacgactgatagcttgccacataatgtctctccccacgttgtctgccagatcataaggttagtgcaaaaatgcggttgaaaaatacgaactaacgcacatcgcggacgcgccgcggcgggaatggcacttattgtgcgtttttactccacgcctcccaggtcgccacggtaatgtcgacatccttatctaacgcgcttttcgcaagtccggcgacaagcgctttgatttcatcagcgctctgagcgctaacaaagccaaacgtattggtgccgagctcatgcacatccccttcatcgtccgttaatgtcagcaaaaaaccgctacgcgtcagatggttattgagttcgttaatctcggtcagggaatcttcatggaaggttacggtaataacataacgggtaatatcgccactggccatcgttcacctcgttgggagcaactgtgtttttaacagcggcggatgcgccgcccgttaaccgattttccgttatccccctcggcgagggggaaacgattattgcgcggaaagataggcgtatattttttgggtatcgtcacgagaacacagacgcgtaccttgattgagcgtagcagcgctgcctgccgccacaccgaagcgcaccatctcttccagcgacgcgtcttgcgccagttttaacgtcatcgcgcctaccatactgtcgcctgcgccaacagtactttgacttttcaccgggggaggaacaacctggatgcaattctcactgtctatgcccagcgccccttgcggccccagagagaccactacccggcgagccttgccgctttgcactaattcctgggccgctttacgcacatcatcaggctgcgtcagatcacgattaaccaacgcgctcaattctttcaggttcggtttcaccagttcgatatcgccaagcgccagcgcggcggtgagcgcgtcgccagagctatcaataatgcagcgaatgccttgcttctgcgcggcggaaatcagttgcgtgagtttctcgaccttaacgccgggcggaaggctgccgctgataaccagaattgccccggattcaatttccagtacctgttcttcaagctggcgaaattcgtcatcgtccagcgtggcgccgggcataacaaaacgatactgttcgccgctggactcgacgtggacgtgcaggttctgacgcgtccagtccttcgcatcgacggtagacacggggacattttcgtcagccagtagtgcgacaagatgttcgccggtagcgccgccagccgggaaaatggcggtcgcggtgccgccaagatgcgcaatggcgcgagcgacattaatacccccgccgccgggttcgaataccggcgcggagcaccgcagtttaccttcgggataaatttgcggcgtgattgttgcgctatcgagagagggcgcaagcgtcaacgtatagatacgtaccatcgttacctcctgttaggctgatttcagtctggcacttaatccccggaaagtgaaggaattaacaatatgattttccggatctttatttaaagaagtgcgatgtaaagttatataaataaatgaatgcttcgggagggttcttattcaaaaaatgaaatagtaattgattgctatgttattcggggcttcttataattcgctacctttccaggggcgtttgtcattgatccctatgaaagtttccgggaccgtcgtggtctcttttttagttgtacggactctatataaatgaagcttttgaaggcagtacccgctgtagttatgctggcgggtggcgtgttcgcgtctctgtatgccgccgccgatgattccgtttttactgtcatggatgatccctccaccgcgaaaaaaccttttgaaggtaatctgaatgcgggctaccttgctcagtcaggcaatactaaaagctcttccttaacggctgacacggcgatgacctggtatggacaacgtaccgcctggtcattatggggcaatgccagcaatacctcctctaatgatgaacgctcttcagaaaaatatgcggtaggcgcacgtaaccgttttaatatgacggattatgattatacctttggccaggccagttggctgacagaccgtttcaacggttatcgtcagcgcgacgtactgaccgccggttacgggcggcagttccttaatggtccagtgcacagcttccgttttgaattcggtcctggggttcgctatgacgaacatacggacgataccactgaaacgcagccgttgggttatgcttccggcagctatgcctggcagttaactgacaatgctaagtttacacagggggtgtcagtatttggcgcagaagacaccacactaaattcggaaacagccctcaatgtcgccattaacgaacattttggtctaaaggtggggtataatttaacgtggaactcgcagccgcctgaatctgcgcctgaacataccgatcgtcgcactacggtaacgctgggctataagatgtaatattgtaccgggttacgttacgtaacccggttattccgtggtgacgcctcagaagaagaaggtgatgtctccgttgatataagaatagtcgtctccggtgcgaaattccgacgtgactttgtttaaagaaagagaaaatgcgacgggagaatagccgatggtggcaccgacgcgatattcatccacggttttattaatatccaccgtttccatttttgtttgcagcgttttcccctgtaacgtgtagtttttatcaacttccctgcgctcaacgccagcaaatactttatagatcaatccctctttttgagtgtgtattaaccctcggcgggacagtaacccaaacccattatcagagttgaaggtcttatcatttcccagcgcaacggttgcgccgtaccccaaatactggaagagattgccgccgacagcagatacttctggatagaagcccacattgacgcccagaatatcaatagctggcgtaagggacaccattccttttgccgtgtaaccataacggttttcaatttgatcctgccaggcagggtatttttctgcgcctattattcgatgcgcccgattctgaacctcctgaccgcctgcgtcaggaccaataacgccaatatcggtacctaaacgataacgtaaccaattggtggctaatgaattccactccagtccggtatgaagaaaggcgctgaacgcgcggtcgcctttgacggcttcaggctttctcttattggcgcctgatggagaataaatatcttgcgcgatatgaaaagagagttgactggcgtcagtgagatcgtggctgtagcctaaaaagagcccggcagtataatcaccccggtctgcagccgggtgcccataaagggcatttaaggatggttgaaatatacctgcatcatcattcgccactgaaatagcaaggctactggcattggccattgtggtcgtactgagtatggcggcaatcatcgttgcgcaatagctgtatttgttcactttttacccctgaatatgaaagtgaatactcttatttttacaaagtaataagcacagcagcatgatgcgcagtgcctattaaacctttaaatataactaaactcctgccagcagcgagtcattgagaggatacgttgccttaatgttgaaaaatggtgttgaaaaacatgcgtcagatattattgaatatccatttttcattcgctatctgagtgcgagaaattattggcttcacgattatgcatataatacgatgttttttggtatcaatatgaatatcacgttgtattcttttgagctcattttctatgatggcttcgatgtttatctgttattaatttttaccgtgatagtgttgtctttaatgatgagaatatctaacggctgtcagggtaatataaccaaattattgctatctgaattattagggcagttattattaaggaagaaaaagtgaacaagaccattaatttgctaaaattactgcccgtagtattattaagcgcatgtactacatcgtatcctccccaggatacaacatcggcacccgagttaccccatcgtaacgtactcgttcagcaacctgataactgtagcgttggctgtcctcaaggaggaagccaacaaacaatctatcgccatgtctatacgctcaataataatagcgtcacgaaatttgccaactgggttgcctatagcgtgacaaaaaccagccaggcaagcggtcgcccgcggaactgggcgcaggaccccgatttaccgccctcggatacgttggccccttccgcctataaaaatgcccatacgctattaaaagtcgacagggggcaccaggcgccgttggcaggattgggcggcgtatcggactggccgtcgttaaattatttatcgaatattacgccgcagaaatccgccctgaatcagggagcatgggctgcactggaaaaccgggtgcgcgaacttgccaaacaggctgatgtatctgtagtgcacgtagtgaccggccccctttttgagcggcatatcgccacattgccagaagatgcgacggtagaaattcccagcgggtactggaaggttttattcaccggaatggcgccgtcaaaaagtgaaggaaattacgctgcatttattatggatcagaatacgccccgttcggcgaatttttgcgactatcaggttaccgtggaggctatcgaacataaagcgaagccagtgctgacgctgtggtctgctttgcctgaagcggtagccagcgaggtgaaaacgacaaaggggagtctggcgcagaagttaggttgtcgatgagaagcgctatacggcgcgtagaaagataacggagaaaccctgtcaagggtcttgatttgctatagagtgatgcaatctccctttttttagtgttaccatcatcatgccggacgaagatagcgattttcgtctgtgtcgaaggttgtgcgccaatttagcaatggttggctagatggatacacaactcactgtcaataaattcattttctctttgtatgtgatcttgcgtaataagtacaatccttcattcacatccattctcgttcgtttaaacctgtttcaccagttccgcgtcattactggtaatagcggatatatatgtttcataccgttttacattgatccctttcgcgccgtaagatgtacgtacctaatctaacttaagcagggaactgtcattcataacacagagtttattggtatcaatggtagattatattacggtgacaatctcgggatgatccgcatatgagtagatgtggattagggcggagtagcggtaggactaataataaccggcggcgagaaatacataattgaggggctattcataaatcatcatctagaaacgcaagcactatcatgaatatatcataagtaatttacgttggtaatgatggctcagcaaacccaacaagctttacaggaacaatttttacgcttcagagccaaataaaacggcggcattgccgccgtataacttatttattgtttcttagtaaaacgaatcttatatgctctgaaaaaacaaaggaagatgcaatgtataccataaaagcaatcatcaaatgctcagggaacaaccatcccatgctaacaggaatcacacttattccaatgcaaaataggaacattatgaaataatgcgctgactttgtttcctgagttttattggagaaatacttagctaggacgcctttaaatactccagatataactaaccaaactggtgtaaaaagcccgaaatctgcgtatagttcaccatacccgaaagcaggagcgccctgatttctgtagaatgcatcagggaaaaatacttttgccagatacaatgcgccaaaatcttcaggcttatcaggccaaatagccctcggaatcctcgagtaaacctcgctttccattagtaattttccgtacataaagtcaaagtttgaggaagcaacaagaacagcattacgggtataatccgagtaattcgccatattttctatcggattcccatcagtaaacgtatatgcaaagaatgccgttacaatgactgctataacagcaaacgattttaccaggaacataaatttaatttttttattttcaatatatgaaaggtaaaggatgaatgctataaatatactaaatattggtcctttgttaccatgcaagaaaataagtatacagttaaataaaactatggaaatacaaaataactttgattttttgtatgtaaagaacgcgcaaatagaagcgacaagagaaaacattaatgaaggatagaagtatataccataccctgttctggttaattcgtatattcttcttgggctaagtatatactctctgaactccatcaacactggaaggtaaatgataaaagcaaggaaggtgaataacaatgaagtaaacacataccttggtttatttttcgtgtttgatttgttgtatatgggttttctttgtgtgtaaagataagaaataacaaatgatgctatgtatgttatatagcaagtatagaaaaacaaatattccactgtataattctgcacctctgagaggtatacaaatataccttcaaacacgtacagtgtagggactgttattatcaggtatgggaccattacatttattattttcccctcaattcttacggaaagagtatagagataaactataaataataagcataatgcaatgtatgaaattataagcatatagagcctttagaaaaaatgcttagtattaaaaatattaccatcaggcaaataaggtgtggtacggaaaatcttctggcaagatattctgaatctggtagtctataatcattactcatcactatcttcccgatatcaaaaccgtgttattgacatattaacactcattaacactcctatctactgcgcctccgatagcatgaagctatcaagcatttgcagcacaaacatcaaacaatgtaaatgcttttgataattacacatgattgttactgtgtttatatacagtggcattcgaagattcatcatgaggttcccgagtcctgtaaaagactatacagagaaagagctatcactcgacgagtaattcatctcacatcgtgccgcgacatacttcaagcaacacagacgaattacaagtacggcatcataagtgagacgttgctagttatagaagcttcatagcagcatgtaatggctctttgctggtatgtgctttggaaagtgggtttcgtattgtgcgttatcgcatgctgccaggtccccatctggagaatatagatagcggtcgtcgtgaaaagctatctgatgtgaatgcctcatacggtggcagtaagccgagactcagagtgaccatgtacatcattaacgatacgcgtgccgggtagtgtgttgggattcaggttctgtagaacagaaagatgcaatctccctttttttagtgttaccatcatcatgccggacgaaaatagcgattttcgtctgtgtcgaaggttgtgcgccaatttagcaatggttggctagatggatacacaactcactgtcaataaattcattttctctttgtatgtgatcttgcgtatgggtcaccactgcaaataaggatataacatgcctgttattactcttcctgatggcagccaacgccattatgaccaccctgtaagcccgatggatgttgctctggacattggtcctggcctggcgaaagccaccattgcgggccgtgtgaatggcgagctggttgatgcttccgatctgattgaaaatgatgcgacgctttccatcatcaccgcaaaagatgaagagggtctggagatcattcgtcactcttgtgcgcatctgttaggtcacgctatcaagcaactttggccgcacacgaaaatggcgatcggcccggttgtcgacaacggtttttactatgacgttgatcttgaccgcacgctaactcaggaagatgtcgaagcgctcgaaaagcggatgcatgagctcgccgagaaaaattacgacgttatcaagaaaaaggtgagctggcatgacgcgcgcgaaaccttcgtgaagcgcggcgagacttacaaagtcgctattcttgatgaaaatatcgcccatgatgataagccaggcttgtaccatcatgaagaatatgtcgacatgtgtcgtggtccgcacgtgccgaatatgcgtttctgccatcactttaaactgatgaaaactgccggcgcatactggcgcggtgacagcaataataagatgttgcagcgtatttacggtacggcatgggcagataaaaaagccctgaacgcttatctgcagcgcctggaagaggccgcaaaacgcgaccatcgtaaaattggtaagcagctcgacctgtatcatatgcaggaagaagcgccgggcatggtgttctggcataacgacggctggactatcttccgcgagctggaggtctttgttcgttctaaactcaaagaataccagtatcaagaagttaaaggcccgttcatgatggaccgtgtgctgtgggaaaaaaccgggcactgggacaactataaagatgcgatgttcaccacatcctcagaaaaccgcgaatattgcatcaagccgatgaactgcccgggccacgttcagatctttaaccagggtctgaaatcctatcgtgatttgccgctgcgtatggcggaattcggtagctgccaccgtaacgagccatcaggcgcgctgcatggtctgatgcgcgtacgcggctttacgcaggatgatgcgcatatcttctgcaccgaagagcagatccgcgatgaagttaacgcttgtattcgtatggtctacgatatgtacagcacctttggcttcgagaagatcgtcgtcaagctttccactcgtcctgataagcgtatcggcagcgatgagatgtgggatcgtgctgaggcggatctggcggttgcgctggaagaaaataatatcccgtttgagtatcaactgggtgaaggcgcattctacggtccgaaaattgaatttaccttatatgactgcctcgatcgtgcatggcagtgcggtacagtacagctggacttctccttaccgtctcgtctgagcgcctcctatgtaggcgaagacaacgagcgtaaggtgccggtaatgattcaccgtgcgattcttgggtcgatggaacgcttcatcggtatcctgaccgaagagttcgctggtttcttcccgacatggctcgcgcctgttcaggtagtcgtgatgaatattaccgattcgcagtctgaatacgttaacgaattgacgcagaaactacaaaatgcgggcattcgtgtaaaagcagacttgagaaatgagaagattggctttaaaatccgcgagcacactttacgtcgtgtcccttatatgttggtctgtggtgataaagaggtggaagcaggcaaagttgccgttcgcacccgccgcggtaaagacctgggcagtctggacgtaaatgacgtgattgagaagctgcaacaagagattcgcagccgcagtcttcaacaactggaggaataaagtattaaaggcggaaaacgagttcaaacggcgcgtccgaatcgtattaatagcgaaattcgcgcgcaagaagttcgcttaacaggtctggaaggcgagcagcttggtattgtgagtctgagagaagctctggaaaaagctgaagaagccggagtagacttagtcgaaatcagccctaacgccgagccgccggtttgtcgtataatggattacggcaaattcctctatgaaaagagtaagtcttctaaggaacagaagaaaaagcaaaaagttatccaggtgaaggaaattaaattccgtcctgggacagatgaaggcgactatcaggtaaaactccgcagcctgattcgctttctcgaagagggcgataaggccaaaatcacgctgcgtttccgcggtcgtgaaatggcccaccagcaaatcggtatggaagtgcttaatcgcgtgaaagacgatttgcaagaactggcagtggtcgaatccttcccaacgaagatcgaaggccgtcagatgatcatggtgcttgctcctaagaagaaacagtaaggccttcaagtaacaattctgtgaagccttcgggcttcacaggctttgttcgcctatgtttcgtttattaacaatgcgaagtggaagttattaaaatgccaaaaattaagaccgtacgcggtgctgctaagcgcttcaaaaaaaccggtaaaggtggttttaagcacaagcacgctaacctgcgtcacattctgaccaaaaaagcgactaaacgtaaacgtcacctgcgtccgaaagccatggtttctaaaggcgatctgggcctggttatcgcgtgcctgccgtacgcataagccgttaacgtttttaactttttaattagaatagatacaggagagcacatatggctcgcgtaaaacgtggtgtaattgcacgcgcacgtcacaagaaaattttgaaacaagccaaaggctactacggtgcgcgttctcgcgtataccgcgttgccttccaggcagttatcaaagctggtcagtatgcttaccgtgaccgtcgtcaacgtaagcgtcagttccgtcaactgtggattgcgcgtatcaacgcagcagcacgtcagaacggtatttcttacagcaaattcatcaacggcctgaaaaaagcctctgttgaaatcgaccgtaagatcctggctgatatcgccgtattcgacaaagtcgcgttcaccgcgctggttgaaaaagcgaaagcagctctggcataagccagtgaaaagagggagcctggctccctctcttttatttactgttcagtgagttgacaattgacctgtaacccttttcaataaaggatattcggttttaccacataaggtaacgcaagcatgaacgctgctattttccgtttctttttttactttagcacctgatcccaggaggctagcgcgtgaaaaacgaaacgaaaaacagcgcaaaaaagcctcctgatggaggctttttttgtatctgaaatcgagagattacgtccaatgaaccggtgtcttcaccgacacaatgaggaaaaccatgtcacatctcgcagagctggttgccaatgcagcggccgccattaaccaggcgtcagatgttgccgcgttagacaatgtacgcgtcgaatatttgggcaagaaagggcatttaacccttcagatgacgaccctacgcgatctgccgccggaagagcgtccggcagccggggcagtcattaacgccgcgaaagagcaggtacaacaggcgcttaacgcgcgtaaagccgagctggaaagcgcagcgcttaacgcccgtctggccgctgagaccatcgatatctccctgccggggcgccgtattgagaacggtggtctgcatccggtcacgcgtaccattgaccgtattgaaagtttcttcggcgagcttggttttaccgtggcgactggcccggaaattgaagatgactaccataacttcgatgcgttaaacattccgggtcatcacccggcccgcgccgatcatgataccttctggtttgacgcgacccgtctgctgcgtacccagacgtctggcgtccagatccggacgatgaaagcgcagcaaccgccgatccgtattattgcgccgggccgtgtataccgtaatgactacgaccagacgcatactccgatgttccatcagatggaaggtctgattgttgataccaacatcagcttcaccaacctcaaaggtacgctgcacgacttcctgcgtaatttctttgaggaggatctgcagattcgcttccgtccttcttattttccgttcaccgaaccttctgcggaagtggatgtgatgggtaaaaacggcaaatggctggaagtgctgggctgcgggatggtgcatccgaatgtgctgcgtaatgtcggtatcgatccggaaatctattctggcttcgcttttggtatggggatggaacgtctgaccatgttgcgttacggcgtcaccgacctgcgttcattcttcgaaaacgatctgcgtttccttaaacagtttaaataaaggcaggataaaacaatgaaattcagcgaactgtggttacgcgagtgggttaacccggcaattgatagcgatgcgttggctaaccagattacgatggctggcctggaagtagacggcgttgagccggtcgcgggaagcttcaatggcgttgtggttggggaagtggttgagtgcgcccagcatccgaacgctgacaaattgcgtgtaacgaaagtcaacgtcggcggagaacgcctgttggatatcgtctgcggcgcgccaaactgtcgtcaggggctgaaagtagcggtggccaccattggcgctattctgccgggcgatttcaaaattaaagcggcaaaactgcgtggcgaaccgtctgaagggatgctgtgctccttctccgaactggggatttccgacgatcacagcggcattatcgaactgccggcggatgcgccgctgggtaccgatatccgtgaatacctgaagcttgacgacaataccatcgaaattagcgtcacgccgaaccgtgcggattgcttaggtatcatcggcgttgcgcgcgatgtggcggtactgaacaaagcgccgctccaggagcctgaaatggcgccggttacggcaaccatcagcgatacgctgccgattacggtagaggccgctgatgcgtgtcctcgctatctgggccgggtggtaaaaggcattaatgttaacgcgccgacgccgctgtggatgaaagagaaactgcgtcgctgcggtattcgctccatcgatgcggtggttgacgtcacgaactatgtgctgctcgaactgggtcagccaatgcatgctttcgataaagatcgcattgatggcggtattgtcgtgcggatggcaaaagagggtgaaaccgtcgtcctgctggacggtagcgaagcgacgttaaatgcggacacgctggtgatcgccgatcaccataaggcgctggggatagccggtatttttggcggcgaacattccggcgtgaacggcgaaacgcaaaatgtgctgctggaatgtgcgtactttaatccgctgtctatcaccggtcgcgctcgccgccacggtctgcataccgatgcgtctcaccgctacgagcgcggggtggacccggcgctgcaatataaagcgatagagcgcgctactcgtctgcttcttgatatctgtggcggtgatgcgggtccgataattgatgtgagcaacgaagcaacgttgccgaaacgcgccaccattacgctgcgtcgcagtaaactggatcgcctgatcgggcatcatattgcggatgagcaggtcagtgatattctgcgtcgtctgggctgtgaagtgaccgaagggcaggacgagtggaaagccgtagcgccgacctggcgtttcgatatggagattgaagaagatctggtggaagaggtggcccgcgtttacggctataacaatattccggacgagccaattcaggccggtttaatcatggggacgcaccgtgaagccgatctgtcgttgaagcgggttaaaaccatgctgaacgacaaaggctatcaggaagtgattacctatagctttgtcgatcctaaagtacaacagctcatccatccaggcgcagaagcgctgctgctgccaaaccctatctccgttgagatgtcggcgatgcgtctgtctctgtggagcggattgttggcgacggtggtctataaccaaaaccgtcagcagaatcgcgtgcgtatttttgaaaccggtttacgtttcgttccggatacacaagccaatctgggtattcgacaggatctgatgctggctggcgtgatttgcggtaaccgctatgatgagcactggaacctggcaaaagagaccgttgatttctatgatttgaaaggcgatctggaagcagtactggatttaaccggcaaactgggtgatatccagtttaaggcggagatgaatccggctctgcatccgggacagtctgcggcgatttatctgaaagatgaacgtattggttttattggggttgttcaccctgaactggaacgtaaactggatctgaatggtcgtacgctggtgtttgaactggaatggaataagctcgcagaccgtatcgtgccgcaggcgcgggagatttcacgcttcccggccaaccgtcgcgatattgcggttgttgttgcagaaaacgttcccgcagcggatattttatccgaatgtaagaaagttggcgtaaatcaggtagttggcgtaaacttatttgacgtgtaccgcggtaagggtgttgcggagggttataagagcctcgctatcagcctgatccttcaggataccaaccgtacactcgaagaagaggagattgccgctaccgtcgccaaatgtgtagaggcattaaaagagcgattccaggcatcattgagggattgaacctatggcgcttacaaaagctgaaatgtcagaatatctgtttgataagcttgggcttagcaagcgggatgccaaagaactggttgaactgtttttcgaagagatccgtcgtgctctggaaaacggtgagcaggtgaaactctctggttttggtaacttcgatctgcgtgataaaaatcaacgtccggggcgtaacccgaaaacgggtgaagatattcctattacagcacggcgcgtggtgaccttcagacccgggcagaagttaaagagccgggtcgaaaacgcttcgcccaaagaagagtaatcagatccaggcataacatccatcagggtgtattgcggcagatacgctgccatcccgaaagtagatcagcgggatgacagcgtatttgtcagcctgaaagatgacccgtataactaaaaaggccgcattgcggccttttttctttcaagtaaaggatacccaccgtaaaatcacgctacctcttttcagctgaatggataacatgctgacttttgcccgccaacaacagcgacgaaacgttcgctggcttctgagcctgtcactgctggtgctactggctacacttctgagcttatgcgcaggcgaacagtggattgcccccggtgactggttaagcgcccgggggaactgtttgtctggcaaattcgccttccccgcacgcttgcggtattgctggttggcgctgcgctggcgctatctggcgctgtgatgcaggcgctgtttgaaaacccacttgctgaaccgggtctgctcggcgtttcgaatggggccggtgttgggcttattgccgccgtcttactggggcaggggcaactgccaggatgggcgctgggactgtgcgctatagccggcgcgctcattattacgttaattctgctgcgttttgcgcgccgccatctctctaccagccgcttgttgttggcgggcgtcgcgctgggcattatctgtagcgcgctgatgacgtgggctatctatttttccacctctttcgatctgcggcaattaatgtactggatgatgggaggatttggcggcgttgactggcagcagagctggctaatgattgcgctcatcccggtactgatctggatatgttgccagtcgcaaccgctgaatatgctggcgctaggggaaacctcggcgcggcagcttggcctgccgctgtggttctggcgcaatttgttggtcgtcgccaccggctggatggtgggcgtcagcgtggcgatggcgggggcgattggttttatcggtctggttattccgcacatcctgcgcttatgtggtttaaccgatcaccgggttttacttcccggctgcgcgctggccggggctatcgccctgctattggctgatgtggtcgcccgactggcactggcgtcggctgaactgcctatcggggtggtcaccgccacattgggggcgccagtgtttatctggctgctactcaaatccgcgcgttagcgcatcggtaaacaactgctttcatcattcgcagtctatgattaaaggctaacgatgaaacccgctattctaccgacatcagggagacaccatgcaaaactcgcttcttaatactcacgttacgacgattgatggagaggtcactacacttgaaaaatacgccggaaaagtgctgctcattgtaaacgtcgcctccagatgtggcctgacgccgcaatatgaacagttggaaaatatccaaaaggcgtgggcagatcaggggtttgtcgtgttgggttttccctgcaaccagtttatggggcaggagccaggcagcgaagaggagattaaaacctattgtgccagcacctggggcgtcacgttcccgatgttcagtaaaattgatgtgaatggcgacgcgcgccatccgctgtatcaaaaactgatagccgctgcgccaacggcagtcgcgccggagaagagcggcttttacgaacggatggtaagcaaagggcgtacgccactctatccggatgatattctgtggaattttgaaaaatttttggtaggccgggatggtcaggtggtacagcgtttttcgccggatatgacgcctgaagatcctattgtgatggaaagcataaaaatcgcgttggcaaaataatgtctcaattgatgcaattaaaggatgtcgccgagagcacccgcctggggccgctttccggcgaagtaagcgcaggagagatccttcatcttgtcgggccgaacggtgccgggaaaagcacgctactggcgcgtatggcggggttaacctccggcgaggggagcatcaggtttggcggagcgccgctggaggcatgggcgacggcaacgcttgcccaacaccgcgcttatcttgcgcaacagcaaaatccgccgttcgccatgccggtctggcattacctgacattgcatcaacctgataaaacgcgaaccgggcagcttaacgaggtggccgatatgcttggattgggcgacaaactggggcgaagcgtgaatcagctttccggtggcgagtggcagcgtgttcgccttgctgccgttgtactacaaattcatcccgacgctaatccggtcggtcaattattgctgcttgatgagccgatgaacagtctcgatgttgcgcaacaaaacgctctggatcgggtattacatcatttatgtcaggcaggaattgcgattgtgatgagtagccacgatctgaaccacacgctgcgccatgcgcataaagcctggttactaaagcgcggtaaactcattgcctgcggccgccgggaagaggtgctcaccccctcttatctggcgcaagcctacggtttgcgctttcgacgactcgacgtcgaggggcatccaatgctcatttcggccacttaagtaaaatcgtttcttgaaaagcaggtaatttcgacgctaaattaataccaaaataaaaacagaggattgttgcggcatgcgtttttggcttcttgttatcacagcattgttcctggcaggatgcagtactcatcgggcaccggcgccaaatgccagattatcagactccattaccgtcattgcgggtctgaacgatcagttgcagtcctggcgcggtacgccataccgttacggcggcatgagtcgcagaggcgtggactgttccggctttgtggtagtcactatgcgcgacaagtttgatttgcagttgcctcgtgatacgcgtgaacaatcaaaaatcggcaccagaatcgataaagatgaattgctgcccggagatttggttttctttaaaaccggttcgggcgaaagtggtttacatgttggtatttacgatacaaataatgagtttattcatgcctctaccagtcgtggcgtgatgcgttcatcgctggataatgtgtactggcgaaaaaacttctggcaggcacggcgaatttaacctcgcagacgatataaattttatagtctatttttaacatatcgccggttgaacttatgacatctgttgtcatcatatataatgatataaccgtagcatttacaaacgtacttttattaaaaacgggcgtgttcacgccctgtgaaaagtacaagattgaatattggtttataatcagagtaagttaaaaaaaggaaccggttcaccggtaaacaagaaaaatgatgacgcttcaattagtatctgaagttacgtctgtttccgtccgtagtgactggatggcgaatagcgccctaaccatgggactggcgtaatgattgcttcacttgatgagctttaccattccgaactctttttccttcccgtcatggatgaaaacgctcggcttgttggtttagagattattgcaacgtttgccgctgaagacggcgccgtgcggatgccgactgagttggtagcgcctcgcctttcggtggaggaacaatactgtctgtttgttgaaaaactggcgttgttagaaacctgtcagcacttttttattcagcataaacttattgcatggcttaatttaccgcctgcaattagtgacttattattattagatagcgaacttttttcccgggcagcgcgctttccgtttcttgaattagctataaatgagaattatcctgggttaaaccagggcaaaaacaatgaaacgttagctaatctggcaatgcatttcccattaatgctggcaaattttggggcaggcgaggcgtcgactaaagctattttcgatgggcttttcaaacgagtcatgttggataaaaattttattcagcagcgagctgaaatgatctcattcgaaccattcatgcacgctattgttgcccagatctcctccagctgcgagtcgctgatgattgccggtattgatactgaggcgatgtttgcgcgcgcagcgccattggggtttagcgcattccagggcggactatggcctccggtgccggtaagccagctcattaaactcgttcagcgataacctttctgtttgccggtgtttaaccggtgattaaccgtctacactgaagacaggaggccctatgaccctgtcttttactgcccgttggcgcgatgaattgccagcaacgtataccgcgcttttacccacaccgttaaaaaatgcgcgactgatttggtataacgacgaactggcgcagcagttagccattcccgcttcgttatttgatgctaccaatggcgctggcgtttggggcggcgaaaccttattacccggtatgtcgcctgtcgcgcaggtatatagcgggcatcagttcggcgtctgggcgggacaactcggcgacggacgcggtattttgctgggcgaacagctcctggcggatggctcgacgctcgactggcatctgaaaggcgccggattaacaccctattcgcgaatgggggatggacgcgccgtcctgcgttcaaccatacgagaaagccttgccagcgaagccatgcattatctgggtattcccactacgcgcgcgttatctatcgtaaccagcgatacgccggttcagcgagagacgcaggaaacgggcgcgatgttaatgcgtctggcgcaaagtcatatgcgttttggtcatttcgaacatttctactaccgccgtgagccggaaaaagttcagcaactggctgatttcgctattcgtcattactggccgcaatggcaggatgtcccggaaaaatatgctttgtggtttgaagaggtggcggcgcgtaccggaagactcatcgccgagtggcaaaccgtcggttttgcgcacggcgttatgaatacggataacatgtcgattctggggctgaccatcgactatggtccctttggttttctcgatgactacgatcccggcttcattggtaaccattccgatcatcagggacgttaccgcttcgataatcaaccgtcggtggcgctgtggaatttacaacgtctggcgcagacgttaaccccttttattgagatcgacgcgttaaacagagcgctggatcgttaccaggacgcgttgttaacgcactatgggcagcgaatgcgccagaagctgggcttctttaccgagcaaaaagacgataacgttttactgaatgaattgtttagtctgatggcgcgcgaagggagtgattatacccgtacatttcggatgttaagccatacggagcaacagagcgcctcctcgccgttgcgggatacgtttatcgatcgcgcggcgtttgatgcctggttcgatcgctaccgggcgcgattgcgcacagaggcggtggatgacgcgctgcgccagcagcagatgcaacgcgtgaatcctgcgattgtgttgcgcaactggctggcgcaacgcgcgatagatgcggctgaacagggagacatggcggaactgcatcggttgcatgaagttttacgtcaaccttttaccgatcgagatgatgactatgcccgccgaccaccggagtggggaaagcggctggaggtcagttgttcaagttagcctgatgccagcagcatcgtctgctggcggagcgctatttggttaacagtagcttcccggcctgagttttgcgcaacagatactcctgaccgttgtgatcgataatgactttgccgtccggacctaatagcgcctgactgttgacgcgccgttcagcggcagggagaagcgtttcattgtctatttccttagggtgaggcagctcggtgttatccatacgcgacatgctatttattaataatcaaactcacaatgattattattatcaataattaatgcgataacagcaagtgctaattctgcggagtgatatacgcgcgcggagagaaaagggcgggtaacgcatcgaagaaacgcccatcccggcaggatgggcgagctattaaaagcggctgtctaccgccgcggcaagtttttccaacaaaacttccgtatcttcccagttcaggcaaggatcggtaatggactgaccatagattaatggttgaccgctgataattttttgcgtgccttcccgtaaaaaactctctgccataatcccggcaattgccgtggagccattacgaatctgctggcaaatatcatcacatacctctaactggcggcgatgctgtttttgacagttgccgtggctgaagtcgacgaccagatgttccggcagatcaaattcatgcaacgtatcgcaggcggcggcaatatcttcagcgtggtagttcggttttttaccgccgcgcatgatgatgtgcccatacgggttgccactcgtctggtagatagtcatctgtccgtctttatccggcgagagaaacatatgactggcgcgggaggcgcgaatagcatcaacggcaatgcgggtattgccatccgtaccatttttaaagccgaccggacaagagagcgcagaagccatttcccgatggatttggctttcggtggtacgcgcgccaatcgctccccaactgatcagatcggcaataaactggccggtgaccatatcaagaaactctgtggcggtcggtactcccagttcgttcacctgcaatagcaagcgacgcgccagttcaagcccataattgacgcggtaactgccattcaagtcgggatcggaaatcaggcctttccatcccacgacggtgcgcggtttttcaaaataggtgcgcatgacgatctccagacgcgcctgatgcttttggcgttgtgcctggagctgcgtcgcgtattccatggcagcattcagatcgtgaatcgaacaggggccaatgacgaccagtagccgtggatcttcaccatttaaaatcttttctatccggcgtcgggagtcggtaacgtgactggcgacggaggacgatacaggataccgctgcgcgagttcggtcggtgttaccaggctgtcgatacgcgcagtacggagttcgtcggttctgttcattacaagtctcagaaatttgttgcttcaacggcaggactaccgggaagtgatgggcatcacgataaaccaatccctgctgatttcaagtgcgaggcgtgtcacacctcgcaggcagaacggcatgataacaaaaaccaacccattaaactagtttgctagtacatcctgcggttaagccccataatatcgagaatcttggtggctatctcttcaacggaataattagtgctgttcaggcaggggatctgattcttacgatacagcgcttcgacctccgccacttccatgcggcactgacgcaacgaggcatagcgactgttttcacggcgttcttcgcgaattgccgccaggcgttcagggtcaattgtcaggccgaacagtttatgttgtagcggttttaacgatgtgggcagcgtcaaattatccatatcatcggcgatgaaagggtagttagccgcacgaataccgaattgcatcgccagatagaggctggtgggcgtttttccacagcgcgaaacgccaagtaaaatgacctgagcctgatcgaggttgcgcaatgaaatgccatcatcatgcgccagggtataatcgatagcggcaatacgggcgtcatacttgttcaggttacccggattaagcccatgagtacgatgagcgatcggcgtcggatccagtttcatctcctgctgaagcggcgccaccagcgcctggacgatatcctggcagaaaccttcgctctgtaagatgatggcgcgaatttcaggtaaaacaatcgagtaaaacaccagcgggcgaacgccggtttgctgataaatggcgtcaatttggtctttgacggcgcgggcgcgactttcgttttccacgaatggcagcgtgatgctgctgatcgtcaccggaaactgcgacataaccgcgtgacccaggacctcggcggtgatggcggtaccatcagaaatatagaaaacatggcgatcaacaacattatccattctgttcatcctgaagagtaaacataattatctgaaagcataaattaaaagtaacgggaaacgtataacttgtcgcttattttataaaatgacagggactttttataattaatgaaaagtgtgtttcatttcctggaaacgcagtttataccgggggttattcagggaatgccgtgctatgcgcgggtttgcgcaactacgtaaacaatctgaaaaaatgaaaaaataaatttgcttgaacgattcaccgtttttttcgcgggtttaagtatgccaggataaatacgcaactatgtgtttcttaaactcgttcatttatcacaaaaggattgttcgatgtccaacaatggctcgtcaccgctggtgctttggtataaccaactcggcatgaatgatgtagacagagttgggggcaaaaatgcctccctgggtgaaatgattactaacctttccggcatgggcgtatccgttccgaatggttttgcaaccactgccgatgcgtttaaccagtttttggatcaaagcggcgtaaaccagcgcatttatgagctgctggataagacagatattgatgatgtctcccagctggcgaaagcgggcgcgcagatccgccagtggattatcgacactcctttccagccggagctggaaaacgccatccgcgatgcctatgcgcagctttcgtcggatgatgaaaatgcctcttttgccgtgcgttcctccgccacggcggaagatatgccagatgcttcgtttgcgggtcaacaggaaacgtttcttaacgttcagggcttcgacgcggtgctggtggcagtgaaacacgtatttgcttctctgtttaacgatcgcgccatctcttatcgcgttcaccagggatatgatcatcgcggcgtagcgctttccgctggcgtgcagcggatggttcgctccgatctcgcctcgtcaggggtgatgttctctatcgataccgaatccggctttgaccaggtggtctttatcacctcggcatggggactgggtgaaatggtggtgcagggcgcggttaacccggatgaattttatgtccataaaccaaccctggcggcaggccgtccggccatcgtacgccgcaccatggggtcgaaaaaaatccgcatggtttacgccgccacccaggagcacggtaagcaagtgaagattgaagatgtgccgcaggaacagcgcgacattttctcgctcaccaacgaagaagtgcaggaactggcgaaacaagcggtgcagattgagcagcactatggtcgtccgatggatatcgaatgggcgaaagacggtcataccggtaagctctttattgtgcaggcacgtccggaaaccgtgcgctctcgtggccaggtgatggagcgttatacgctacatgcgcaggggaaaatcattgccgaaggtcgtgccattggtcatcgtatcggcgcaggtacggtaaaagttattcacgatatcggcgaaatgaaccgtattgagcctggcgatgtgcttgtcaccgatatgaccgacccggactgggaaccgatcatgaaaaaagcggcggcgattgtcactaaccgtggcgggcgcacctgtcacgcggcgattatcgcccgcgaattgggcattccggcggtagtcggctgcggcgacgccaccgaacgcatgaaagatggcgaaaaagtaaccgtctcctgcgcagaaggtgataccggttatgtgtatgccgacatgctggatttcagcgtaaaaagctccagcgtagataccatgccagagctaccgctgaaggtcatgatgaacgtcggcaacccggacagggcatttgactttgcctgcctgccgaatgaaggcgtaggtctggcgcgactggaattcatcattaaccgtatgattggcgttcacccgcgtgcgctgctggagtttgacgaccaggatgccgcgctgcaaaacgacattcgtgagatgatgaaagggttcgactcgccgcgtgaattttacgttggtcgactgacggaagggatcgcgacgttaggcgccgccttctacccgaaacgcgtcatcgttcgcctgtctgactttaagtccaacgaatacgccaacctggtcggcggcgaacgctatgagccgcatgaagaaaacccgatgctgggcttccgcggcgcgggtcgttatgtcgcagaaagtttccgcgattgttttgcgctggaatgcgaagcggtgaaacgcgtgcgcaacgatatgggccttaccaacgtcgaaatcatgatcccgttcgtgcgaacggtcgaccaggcgaaagcggtcatcgaagagctggcgcgccaggggcttaaacgcggcgagaacgggctgaagatcatcatgatgtgcgagatcccgtccaatgccttgctggctgaacagttcctcgagtattttgatggcttctcgattggttctaacgacatgacgcagctggcgctggggctggatcgcgattccggcgtggtgtctgaactgtttgacgagcgtaacgacgcggtgaaagcgctgctgtcgatggcgatccgcgcggcgaaaaaacagggcaaatatgttggaatttgtggtcagggtccgtccgaccatgaagactttgccgcctggctgatggaagaggggatcgacagcctgtcgctgaacccggacaccgtggttcagacctggctgagtctggcggaactgaagaagtagtgtaataccggatggcggcgttaacgtcgccatccggcaatttataccgcagtgtgctcctggcgcagccgctcaataatatcctgccgcaacagaaacttctgcactttgccagaggcggttctgggcagtttttctacgatgacgatccgttccggatatttatacttcgctacccgttttcgactgaaaaaagcgatcacctcttccagcgtcagcgaaaggtgtggcggttttaagactacatacgcgcatgaacgttcgcctaagcgttcatcaggcatagcaacgacgcaagcatcgtgtatgcgggggtgttgcaataaaatatcctccacctcgcgactgctgatattttcacctccacgtataataatatcctttttgcgcccggtaattttgatataaccgtcttcatccatgcggcagaggtcgccgctgtaataccagccctcattatccagtgcgcgggcggtaagttccggctcgtccaggtatcccataaaaacgttcggcccgcgcgaggcttcttcgccttcgtggcctgctggaagcgtattgcgatcttcatccacgattttaatttctacaccggtggcggcataaccatcggtgttcatcatgcgtgaagtcgaatcacccagattaaccatcgagtgtggagaactttctgtagaaccgtaaatactcaataatttgataccgcgctgctggcagtcgcgggcaacctttttgggaatagtcgtgccgccgcataagaagaatcgtagtgaggagaggtcggcaggctgttgctcaatggcacaaagcagatcgtaaataaacggcgtcgcgcctgacatacaggtacagcgttgctgcgctaataaggtaaggcaggcttctggggtaaagatgtccagcaatacgctacgcgccccgattaaaaagggcgcggtgacgccgtgtaaaaatccggtggcgtggcccagtggcgcaggcatcaggaacacatcttgccaggttaaattcaaccgcgcgcaatacgcccgttcgctggcaagaatattattgtgggtcaacatcacccctttcggcattccttctgtgccggaggtaaacagcactgccgccagttcatcaccgtgaatgttaatgtctgactgcaacggttcgctgcggtcgatgatttgactaagcgcaagcgctgtggtggcaggcgccagtttatccacgccgacaatatgcgtcagatggcgcagttgattttgtagcggaaggataagatcgaccggacgattctgtttgaacacggtgggggcgaagaatattttagcctgacatttgttcagcacccaaaccagctctgcttctcgccaggcgggaagtagcgggacagataccgcgcccgttttcaggcaggccagataaatgagggtaaactcacaccagcccggaagctgaaaggccacgcgatcgcccggttgaatcccctgagacagtaaccagtttgccaggcggcttgccgcgtagtcgagcgcggcgtaggtccaggacgcgccatgattatcgaccacggcgattttatcgggtacggcgcgtgcggtttgccgccagtagtcgcccagtgaagcatcgccccagtagccggactcgcgataggttttccgccttgcggcgtcaaacgttaatgtaacactcattgacttgttctctattaatacaaatgacgtaatctccgggggcaagccgaataagacgccgtagcgtcgttatccggtgtttcagagcgtcagccgtagcgaaactcaacgccgaacgttcccgccgggtattcccatttttcgagaagagtattgccgcagagaaccctgcaggtcccgcattccaggcagcccgcggagtcaaaatgaatatttcccgcatcgtccagcttatagagtccggcagggcaggcttttattaatttattaaactcctgcatgtcaggcgaggagcgcaaaatgatatgtgggtgtccttcatctacgtaaaatttatttacgcccaatttgacgtcaacattcaccttattgtccgaactcataatgccgtagccccttttatgccgtcttttaatagattcaccagtccaatttttttcgcatgtgacaggatagttttacgcaacggtgggactggaccgccatcaacggtgaacagatcgcccacaatgtttgccgccatacgcgggtactcggtaaaaagccgtgggttttccattaatccggggagtttgcggaaatgccgcatatcgcgtaacacgccgtttttctccagcgcgcgtttgtaaccggcaagactcgcggcggaaaaatcttgccgcgctttagcgtcaatggcggtttgagcggccgcttgcgcggacgcgatggctaaatccatgccgcggacggtatagccgagattcagacaaagaccggcggcgtcgccgacaatcatcacgccgtcatttgccagctccggcatcattgctatgccgccttcgggcaccatatgagcggagtattcaagcagtgttcccccctgaatcaaagggcgtattgccggatgctgtttaaaatcttccagcatttgcggtacgcttttggtcgcgtgagcaatgtcgcccaggccacataccagccccagagaaaccgaatcgcggttggtataaagaaacccgccgcccatgagcccgttggagggcgcgccagcgaataaccaggcggcgccttcatgggacgccagattaaagcgctcttcaataagtgccggagagagcccaatcaactcttttacgccgactgcatagtgatgcgcagaagagacaggcaccatgtccagcgaacggcccagcatggaattcacgccgtccgcgagaatcacaatattcgcatccagaatatcatccccggcctgaacgccagtgaggcgattgccttcacgtaccagagcgtcgacccgtacacctgggataaactgcgcgccagcctgttccgcctgcgccattaaccacgggtccagtttgttgcgcagtacggtatatgacgtaaggggcggagtagggggcgcgcggtgaaaatcaagtgtgacggcgctttcttcggttaaaaaggagattttttcacgggtaacgacgcgttcgatgggggcggacgttgcgaatcccggcataatactttcgatactgtgagcgtagagccggccaccggtcatatttttgctgcccgcgctgtttccgcgttcaataaccagtacatccagtcccgcttttgccatcacatacgcggcgaccgttcctgctacgcctgcgcccaccacaatagcgtcaaatttatcatccgacatgctttatgctcctttcccgccgtatcgacgacgggagatgtgcgttgaaaaaggaattagcggcttaactggtcgatgagggcaggaacaaccttatagatatcgcccaccaggccataatcggcataattgaaaatgggcgcgtttttatctttgttaattgcgacaataatttttgcgccgtttccacccaccatatgttgaatttggccggaaatgcccagcgtcagatagagatcggatttcaacagaacgccggatacgccaatataacgctcacgttccatccagttttcaccttccgcaatggggcgggaacagcccacttctgcgccgaggacggtcgccagtttatgcaccatatccagatcgctttgcgccgccagacctcgtcctacgccgatgacccgtttggctttgctcaaatcgacgctgcttaacgatttcgcgcgccgctgctggcacaatacctcgtggcgtggggcaatatatgccagcgtggtctgcgggcaagtatgaccggggagaggggcggcgggttccagtacgccgggtgccagcgtaataatcgcctgcggactgtttaatttctctttgccgaaagcaagtccgccgtacatgcgatgctctgcgtgtagcgtcccgtcgaggaggtcaatagacgtcgcgtcgttcaccatcacggcgtcaagctggatgctcagccgggcgcccagcgctttacagcgcttggtcgccgccatgagcagcagcccattttggtcgcctaataacgaggccagcgtttcggcatagttttccacgcgctgcaaatccgtatgcgattcaagaatgactatctcatcagcgccaagcgctttcacgtagtcgatatccgtgtttccttgcacgatggcgtaaactttttctccccactgccgcgcgccggtcattaattcggcataacgctctacgttatcgctaaatacccatacgttagctaaatgattcatgataatttttctccgttgggcttagttcagggattttttcaaatggtcggccagtgcggtaatgacttccggcgaatcgttatcgagaatgatatgcttgcgttctgtctgcggcggtaccgagatggcgaccagttccgccattggcgtggttggggtccagtggatatcgctcgccagccacgacgtaacggcttttttcccggcgccgagaatggctttcattgacgggatgcgtggaacgttaatatctgaggtcacgcaaagcaccgcgggcagcgtgagctcgataatttcaacgtcttcttccagtgtgagttcaacgatgattttgtcgccgtcgcgttgaatatggcttactgcgttgatgacggggagtttcaggagttcgccagtcagcaggcccacctgttgggcataaatatcgccggagccctctccaaagagcaacaggtcaaagccgattttctccgccgcggatgctagcgccagcgcggtttctttgggcagggcgtgctccatttgcgcatcctgaaccatgaaaagcgcatctggcccgcgggataacacatctttgcggacttttgaattttgtaacagagagccgccgacggtgagcgcggcgatctcgtcgccaccgccagctaactgcgcggcggcctcaattgcatttaaatcaaactggctgattttggcctcggcacgatcaaaattgagcgaatgctccggggtcacggtaatgtcctgttcttcaggcaccaacttaaagcaggttattattttcattgcatctccagtgagtcgcgtgcggataagtaacgtaaatctgactgaaaatagtctgcggcagtctgaagaggtttacgatgggtcaatctgttttccttgccaacaatcttgcacaaaaaatctgcgaacagagaatcgttagcaaccatctgaaaagggcgtcataaaaatataaatacggtagtgagaataataagtgcgaagcatatcatcattttttaacatgaaacgtgcgatgttgtttctgtgaggttaaaagaaaacatcaaagatatgtcggctatgtatttttgtctgataatacgctatcgacaggtaatctgagctgtctgcaaaagaacataatatcttgcattcggaacgaataatcttgttttgctggtaatctccacggttgtacaacactgacgctcgctttattttatcctggttatctttttaaacctgacagaggttattatgtatcagcgctgttttgactccgccgcggagacgatttttgaacaggacaagacccctcgattttcacgttttgtcattagcgatgatccaaactgggagtctggccatcatatgcatgataatgaaacagagcttatttacgtcaaaaaagggatagccaggttaattattgactcttcactctacgtcgcgcatgcggacgatattgtcgtcgttgagcgggggcggctacacgctgtagcatccgacagcaattcgccggctaccacctatacctgtgcgctgtatgggttttgttttccaggttgggaagaaaaccaactattgcagagtcattcctgtccggtggtttccgtggttcagggaaaaggggtcattaaaagtatctttaatgaattaagcgtgttacttccgcaggggaaaaacgtattggcttcctctgtatacgatgcatttgcttacactctgaccgcactttactatgaaaattttaaaaacgcctatcgttctgaacaaggttacattaaaaaagatgtattaattaaggatgtacttgtttatctcaataataattatcgtgagaaaatcacgcttgaccagctatcgaaaaaatttcgcgccagcgtcagttatatatgccatgaatttgccaaagaatatcatatatcccctatcaactatgttattcaacgacgtatgaccgaggccaagtttgcgctgacaaacactgagtcgccactggcagaaatttcatggcgggtaggatatgaaaatgtggaccattttgccaaattgtttatgcggcatgtaggatgttctcccaacgattatcgtaagcaatttaaaaatagtctggttgagcaggcgtatttgctgccaaatacctgacggcgaaatatatctgatttattcggcctgatgccgtaaagcagtcaggccgaataagacgttccggtacgatccttacttgttctgatagtctttcagaatctggcgtcctgccacatagatcataatttcatccgtgccgccaccgatacgttcgcagcgaacatcgcgccagaagcgggagacacgggcttcgtcagtataaccaagcccacccataatctgaatcgcatcgtcaatcacttccatcgctgtgcgtgcgcagtacagcttagccagcgcggcgctggtacgcagtgactcttcccgatcggcctgccaggcgactttcaacaccatattgcgcatgttttcgattttgatggccattaacgccagcttttcctggatcatctggttatggccgatgggtttaccaaaggcgatacgctggttggcgtaacgggcggcatcttcaaatgcgcattcggcgaaacctgtactgcgcgccgcattaatcaaacgctccatctcaaaattgtacatgacattgaggaaacccatgccttcttcaccgacccggtcgctttcgtccacctcgacattatcgagataaacttcgcatgtactcaacatgtgccagccaattttgtgcagcggattaatctttatgcccggtttatttgagtccacccaccaaagcgtgaacgcttttttaggatcttttggctccgtatcgcgcgccagaaccagcatgtaaggatattcttttgcaccggtgataaatgttttttggccgttaagataaaccttgccgtttttacgcgtccaggttgttgtggcgctattattatcagagcccgcgccaggttctgttaaggctagcgcatatgctggatcgccggtggccagagtactttctgctgttttacgcagttgttctgcggaaccaaaacggcgcatactgtgaatgcattggccgttggtaatcaaaaaggccggagcgccgcattttgagatttccatcagcgccagcatttgcgttacatagtcagccggaatgccgccgaattcttccgggacgcccagcatcgaaataccgttttccgccagcgcctgcataaattctttgggataggtgcccgtttgatcgcaggtacggaaatactcttccggaaaattgctggtgattaactcgcgaatactggccagtaatagttcttgttcttcagttaatgaaaaatccatatttgtactccttttaatgtgttgcgtcaggaagcgtgaatcccatagtgctatcggtaaataatcttgtgtccatcagttttaaatctggtgagataaccggtgaaaaatccatcttgtcaagaatatcccgttgcagatcgacgccaggcgcaatttcaattaaatgcaggccatcttgtttgagagtgaaaaccgcacgttcagtgatgtaacgcacgtctaacccgcgctcaagcgcaatttttccactgaacgtaatttccggcagttcgctgacgaattttttcacgcgaccttcctgcagaatatttaatttgccatcggtaatttcagtttttaaacttccggccgtcagagtttcgcagaaaataattttttgcgacgttgcgctaatatcgataaacccgccggtgcccataattttgccgttgaatttatgtacaccgacattaccgtgttgatccacttcggcaaaacttaaatagcagacatcgagcccaccgccgtgataaaaatcaaattgtgaggtcatatcaaggatcgcgcgggtgttgacattagcgccgaaggccacgccctgagaggtaataccgcccaccgggccagtttctacggtcagcacgaagtcatcggcgcagccttcctcgcgagcgaccagaccaataccgtcggcaatgcctacgcccacattgcctaccgcgcctttacgcatttcaaacagcgcgcgtcgggctaccagcttgcgctgattaaggggtagggtaagctgcgtactatcatcaagagtgaaatccccggagataaatcggttcaccggcgcgccgccatagagttgcgtctggtcggcgtcgacaaccacaatatccaccagatagccgggaatacgcacggattttggatgcagcgtggctttttttaccattttctgcacctgcatcattacaataccgccattattgtgaacggcctgggcgatcaccagcgcatcaagatacatcacctcatcttcaaatgatgcatagccttcgctgtcgcaggtggtggcgcggataaaagccacattaggcgctatcgctttataatagagatattctttattatcgatctctaccagcttaatgagatcttctttagtcacgtcgtttaattttccgccctgttggcgagggtcgacaaaggtaccaataccgatatcgctcagaatacccggctggtgtgcggcgctggcgcgcagcgtctgggttaatacgccttgtgggtagttataggcggcgattttattttgttcagccagttcagaaatacggggagattgcccccaatgtccgcatagcgcccattttaccagtccctcctgcgccagcgggctgatgccgcgatcggcgcggtcacctaatccggtagggctaataatagataaatctcgtggtgactgggttgtttgatatttatctgccagtgcggtaattaatgttgtcgcttcgagaataccgccgcctgcgcccagaatacataaagtggcctcatctggaatataatttactgcttcttgtgcagagagcacgggaacgcggccattaatgcgtgatggcttattgattttcatatttactccactattatccctgaaaacaatatcgatataaccgtgttaaggtaataaagacagcggctttcaatgaatatggaacatattcatgtcagataactatttattttattgtggcagaaagagaatattccgccacacgataaagtattacgcctggtgcaatatagttaatacggtacgcagatcggctaccgatatttgtcccggcgcagatgcttttttcaccgcgccaaacgttgccgcagaaccgaacacttcgccggcaagacgagatattaccccggttttcgacatcgacatggtaataatcggacgatccgcatagcgctcctgcatttctacagtggcggtaagtaaggtcaggacatcggctttagtctgtggcatgacggcgatcttcggaatatcagcgcccagttcctgcattttacgcagacgctgaacaatctcttccgctgcgggcgttttatgaaaatcatggttagacatgatcaccgcaacattgtgttgatgagcatagccgacggtggctttcacctcatcgtcgccggtaaaaagctcaagatcgatcatatcgaccagaccgctgtcaaccgctgcacgattcagatcgatatactgtccggtggttagcgcctgttcgccgccttctttcgcgctgcggaaggtaaatagcaagggtttatcggtaataatctcccggatggcgccggcggcctcaagtacgctttccgccgttgtcacgttggcaaaatggtcaacgcgccactccagaatatcgaaatccgcttcacggtaggcgagtgcttccgatttcacatcggtaatggtttttcccattagcgacacaatgatctttggcgcgccttcgccaaccacgagatctcttacagttacggttttcatttggtacccttcattgtcattcgtcgcaattataattttaccggtcaggctgtgaatcccatcacctgctttacatagtccaatggaaacgcttttcctgtccacagttcaaactgttcggctccttgccataacaacatgccgtaaccatcaattgttttgcaaccagcttgttgcgcctgctgcaataactttgtcatatgcggattataaacacattcggtgaccagcaattcagggcggagcagggaaacatcgccgatcagggattcgttctccaatggtttcatgccaactttggtgccgttcgtcagaatatctgcgctggcaagcgcttcagtaaaagcgtgctgatcggcaagatcggtgacggtaacgacacaatcagtgttttcattcacccgcttcgcaaaggcaaccgctttttcgaaaaagtcatctttacggttaaacagtttaatttccttaatgccttcaatagctgcctgggcgccaatggcggtagccgcgcctcccgcgccgagcagcaccatggtttttccccgcatatcgaaaccgctttctttaattgcccgaatatggcccgtaccatccgtgttgtagccgcgtagatagccgtcatcgttaacaatggtgttgatagcgccaaccagttttgctgctggcgttaattcatcgacatactcacacgcgagctgtttgtttggcatggagacgcccgtaccgcgcatttttaatgctttcagtccttcaatggcgctggcaaacgtcgtgttatccacttcgaaagccatataggtatacggtagccccgctttttctaacgctttgttttgcatttcgggcgataagctatgacggataggatacgccataagaccaattaattcatattttgcggtaacatccattttatactccttaataagtggacagtgcagagcagggcgcatgcctgttgcgcatcgttaacatttttactggaaataatgctcgccaaatcggacatcgttttgcgggatcttaaatacgcgataatagcgaataaatacaataatggcggtgataaatgtcagtagtgcaaaggcaaaatctaacaaaatgatatattgcaggccaatagtagagagataaccggtaatcagtgggataagaaagttagctacgccccccatcatcatatatatactggtgactttagctttactcttagggaaaaattccgacattaccgatacgcctaattgtaaaatacctccagcagcggaaaaaccaatcacgaaggcgccagcattacagatcagtggagagggatacaggtaaattgccgcagcggtgattgtcgccagcccggcattgaaaacattggcccagatggggcgaaccatttttttcagcaatgcggcaaaaataaacacgcaaaccaacgatcccatactgtaataagagatggttttcagcgcgtcggattccgccattccggcgaaggccatcgcatatttaggcatccagaccacaatcacatagaaggttgagaacgcggcgacgccaaataaaacggaagctacgccttccagccagacgaggggagtactgttcatctggggtaattctttcgcaatactggcatcgacaagttggctgggaaaacggcttttcaacagcatcaacgtgatgaggacgaaaaggataccggggattaccaccgcgtagccgtaccagatatggttgactagcaaggcgctgacgataaggggataaatcatttgcccaaaagagaccatcgctttaaccagaataactgccgagcccgatgctttgggaaaacactccattaatgcagggtatccgccggtatccagcgcggagttcgccacgccgacacacaccgctaatatgaaagcgatcatcaggttaggactggcgggaataccgaagaaaaacagcatatatagtacggcgccaagcagtattattgcccgacggccaaatttatcggacagtacgccaaagaataaaatactgaccagacgaccaagaccaatgccagagattaaataggcaataccggcactatccgtggagaatttctgtgcaagggaggtcatgttctgggctagtgtaataacactcatgccgtggagaaagtaactaaaataaatgcagataacagccagcaaatatggcatgttgcgagccttgttctgagacatttgttcacagctccttgctgatggtttgattcaatgtcctgcttattactgctttactacatgcagcgattgttcagtaacactataagtcggtactgtcgttatatgtacataacatggcgtttaaaatgccaggtttattgcattgatagcatttcatttgttagccaggaaatataaaaattgctgcgaatttgttgtttaatacatataactcgtgatgctcatcgcaatttttctgataagtgtgaagataatgaataataattaacacgaaaattacattttttgtttcccggtgataatggctaacgttttattttgcatagcaaggcaataatattgcaactggcacgctaacatttattgcgcggttgacgctgcttcagcgtgatgttgtgattcagcccgacttcggtaaccgatgaacagtgcgaggagaaatcccactgcggcgataccggtatcaaaccacataatatgtgcaatgctcatttctgaaatccgcgctgtgatcaacggaatagtgaacgtcgcgatactgccggcgctgtaataaataccggtcgctttacctttctcctgtggaaaacgggacgccatcagcgtcaggccgatttgtactacgccaccggcggaagagaatccaatgacgaatgcgaagatcataacaatataggtctgaggatgcaggcagaccgtcagaagcgcaataaaagagataaaggtataaaacatcaataatgtggtagagcgaattgtttttctgaccagcggggcggtaataaaaacgcagagtagcgatccgcaggtataaatacttaacagtttgatggattgggtatacgacattcctgcgacgaactgtccatactgcgccagccactggctgataagataaaaggttgccatcgagatatagccataaagggtgtagctgataagatcgatgagggagcaatgatgtacgcctgtgactggcgcttgcgagattttgggcttcaatatccgaccaggatagggtggaaaagggcagcgtaataaaaacagagcattaataagcatgatcgccccggcaagcaggaaggaccagccaaaccacatattagcccagactaataaactgataataatgggcaacaagaattgcccgccagagacaaatgctttgatcagaatatttgccgtactgggggagcgagggaaggcttccatcaaactgggataggtacctgcatctaaaaaactgttggccatacccgctaaaaagccacaggcataagcgacaaaaatcgtctgagcataaagaatgccaatgaaaaaaatcaggtaacaggtggtccccagaatgataaaaggacggcgaccaaagcgatcggaaagcataccggcgattaacaaaacgcttagccggccaataccaagcgaagagatcacaatagatacgcctgcggcactggtatgccattgctgttcaagcgatgacatgttcaggctcatcaggataacccccatgccatgtacaaagtaattaaaatacaaccctacagcggtagggaaataacgatttttcatattatctgactcagagatgccgcctgaacgttacagtggtatacacaggcaggaagcatattggatagggtgacaagtcaatgtcgtgattgtgtggctttctatccggtatcaatacgatgcggcgataaagtttacgtctaacacagccgctccagatcatgtgcgaaaagttcggcagcaacagattgataaattttccactcgataaaatccccctctgtataaatggactgaaaagaagataaatcagggaagtaacgcattgtattattgccgatgcggttatttattttgtcaacaatggcgttaattcgtcgctgtctcctggctttcatttcctttagcctggcaatgatttctggagagatgggtatgtcgccagcttcccatcgttgccaggttgccgaattattatcctgggtgatatagattgtgcattcttcaatcgtcatatcaaaaatacgccgtagtgcttgtagttctaacgcgttcatcattttttaggcttttatatgaaaaaagtgatgctataaatagcaccaccgacaccgtttcgacttgaacagaatcacactattttgtgcaatattatttgttcgttgcagatatcgcggtgttgaaggaaaacgggagctggcttatgtaacaatgcggcgaaaaaagttaaaaaaaaagcccatcgtaggagacgggcaaagactacacacagcaattcgttgtttcactcaggggatttccatgcttataaatcaatgtgttgatttataaccgtgtgctaatagtaggcatgagcactttttgcgtcgatcagattcgtctcaatagtttaaaaactgtaacggatttgcgacagaaatgagatgcggcggggaacagacgggcgaatcaaaatggagtgtgcgttgaattgataaacgtcgctaaagcatcgggcggcaatgccgcccgacgggattatgactgcttgttggcttcctcgatatcatccagctcttcaaggatctcctctggttcattcgtcggcgccggaacttcatgtacccatgcggagaacaaacgccaggtcacggccagaagcaccggtccaataaacagaccaatcataccgaatgcaatcaggccgccgattaccccggaaaggatcagaagcagcggtaaatcggcgcccatgcggatgagtaccgggcgaatcacgttatccagagtgccgacgacggcgctccaaaccagcagcacggtgccccaggtggtgtcgcctgtccagtaaagccagataatggctggaatcaataccggcaacggccccaactgaaccagacacgaaaggatcatcactaccgtcaacagagtagcgtaaggcacgccggaaatcgccagcccgacgccgccaagtaccgcctgtaccagcgcggtgaccaccacgccaagcgccacggcgcggatcgcctgggcagccagcagaaccgccgcatcgccgcgtttagccgcgagacgacaggcaaaatggcgtatacccatcgccacttgttcgccgcgccagtaaagcagggcgctaaacaacagcatcagggcgcagtgcatcataaagcgtccgatatgcgccgcctgaccgacaaaccaggtcgtggttgtgccgatataaggccgcactttcgccataatagcgctaccgcccatatccagcaggctatgccatccggcatacagtttggcgccaaccaacggaatattatttaaccatgccagatcgggtagcgtcatatcgccgccggtcactgcatggatgagcgggccgctaccatcgacaatgctgttcaccagcaaggcgacgggaataacgaagagcagcactaacagcagcgtcatgaccagtacggcaagcgagcggcggccccacaatattttttgtaatttcagcaaaacgggccaggtcgcgataacaatcgtacctgcccatgcaaaccccaaaataaaaggctgtactatccacaaacaggccacaatcatgatggctaaaaacagcaccgatagcagcacttgcgcaatatccctgggctgacgaacatttaccataaatacttttcacctttgtctttgcgccagaacgttggcgcgacgtgaacatgcaaaccacaccctataatgatgagcaatttcagcggtttttaacaggccgattctgcatgtaattctgttgggcgcacaggaaaaaaatgtgatacaacaaataacgcaacacgcaaacgattaagcatcccttcctgtgcgtagaccgctcgcgctcgccgggttgggcgccaccgttcacaacatagaccgcaggaaaaggtcaatataatgattccacaaatttctcaggcacccggcgtcgttcagctggtgctcaattttttgcaggcgctggagcagcaagggtttacgggcgatacggcaaccagctatgccgaccgtctgacaatgtcgaccgataacagtatctaccagcttcttcccgatgctgttgtgtttccccgttctacggcagatgtcgcgcttcttgcccgtctggcggcggagccgcgctttacgtcgctgatatttacccctcgaggcggcggtactggcacgaatggccaggcgctaaaccagggcattattgttgatatgtcccgctatatgaaccgcattattgaaattaatcctgaagagggatgggtgcgggtagaggcgggagtgataaaagatcagcttaatcaagcgttaaagccgtatggctatttttttgcgccggaactttccaccagtaatcgcgccacgcttggcggtatgattaataccgatgcctccggtcagggttcgctggtctatggaaaaacgtcagatcacgtcttaggcatacgggccgtattgttggggggcgatatccttgacacgcaatcgatgcccgtagagcttgcccggacgctgggtgaaaacacgacgacgccaggccgcatctatcagaccgtctatcagtcctgcctggaaaaccgccaacttatcctcgatagctttccaaagctcaatcgcttcctgacaggctacgatttacgccacgtctttaacgatgacatgacccgcttcgatctcacccgcatcttaacggggtcggaagggacgctggcgtttattactgaagcccggctggatattaccccgatacccaaagtccgccgtctggtgaatgtaaaatacgactcctttgattccgcgctgcgtaacgccccttttatggttgatgcgcgcgccttatccgtcgagacggtcgattccaaagtccttaacctcgcgcgggaagatattgtctggcactccgttagcgaattgattaccgatgtgccggataaagagatgcttggcctgaatatcgtggaattcgcgggtgacgatgaagcgcttattgacggacaggtcgaggcgctgtgccaccggctggatggcctgatggcgcgagcggaagcgggcgtgatcggctggcaactttgtaccgatttgacgggtattgagcgtatttacgcgatgcgtaaaaaagcggtagggctgctgggtaatgcgaaaggcgctgccaaaccgattcctttcgcggaagatacctgcgtgccgcctgaacatctggccgattacatcgccgaatttcgcgctctgctggatggtcatggcttaagttacggcatgttcggccacgtggatgccggggtgctgcatgtgcgtccggcgctggatatgtgcgatccgcagcaggaactgttgatgaaacagatctccgatgaggtcgtcgcgctgaccgccagatacggtgggctgttgtggggcgagcatggaaaaggttttcgtgcggaatacagcccggcctttttcggcgaagttctgtatggcgagctgcgcaaaataaaagcggcttttgatccgcataatcgacttaacccgggtaaaatctgtccgccgcaagggatagaggcgccgatgatgaaggtggatgcggtaaaacgcggcacctgggatcggcaaatcccgctggcagtgcggcagacctggcgcggcgctatggagtgtaatggtaacggcctgtgctttaatttcgatgcgaaaagcccaatgtgcccgtcgatgaaaattagccttaaccggatccactcgccgaaagggcgggcgacgctggtgcgggaatggctccgtctattggccgatcgcggcgtcgatccgttgaagctggaaaaggagttgccagaaaaacgcgccagcttacgcacgctgattgcccgcacccggaatagttggcacaaacgcaaaggcgagtatgacttttcccatgaagttaaagaggccatgtccggctgtctggcgtgtaaagcctgtacgacccagtgtccgattaaaatcgatgttccggagtttcgttcacgtttcttacagctttaccatacgcgttatctgcgcccggtacgcgatcatctggtggcgacggtcgagacctacgcgccgctgatggcgcgtgcgccaaagacctttaacttttttattaaccaaccggtggttcgtaatctggcgaaaaaacatatcggtatggtggatttacctctgctttctgccccttcattgcaacagcaactggtgggccatccgtctgccaatatgacgcttgagcaactggaacgcatgagcgccgagcaaaaagcgaaaacggtactggtggttcaggatccgtttaccagctactacgacgcccgggtcgtggcggactttatccgcctggcggaaaaactgggcaggaggccggtattgttaccgttctcgccgaatggtaaggcgcagcatattaaaggttttcttaatcgctttgcgaaaacggcgaaaaaaacctctgagttccttaatcggatcgccgcgttggggatgccgatggtgggtgtcgatccggcactggtgctgtgttatcgcgacgaatacaaactggcgctgggcgaacagcgcggcgattttcatgtgttgctggtgcatgaatggctggcgcaggaaataaatgcaagactgtccgtcgaggtgagcggcgaaccgtggtacttttttggtcattgtacggaagtcacggctttacccggcgcgcctgcgcagtgggccgccatctttgcccattttggcgcgaagctggaaaatgtcagcgtaggctgctgcggtatggcgggcacttatggacatgaactcaccaatcataaaaattcgctgggaatttatgagctatcctggcatcaggcgatgcaacgtttaccgcgaaaccgttgcctggcaaccggttattcctgccgaagccaggttaaacgcattgaaggtacgggcgtgcgtcacccgttgcaggcattactggagattataggttgatctggaaacgtgaagtgaccctcgatgcgcttaatgcgatgggggaagggaatatggttggcctgcttgatatccgctttgagcgtattggggacgatacgctggaagcgacaatgcccgtcgatcatcgcaccaaacagccgttcggcttgctgcatggcggagcgtctgtggtgctggcggaaagtatcggctcggtcgcaggttatctgtgtacgcagggggagcaaaaggtggtggggctggaggtgaatgccaaccatgtacggtcggcgcgtcaggggcgcgtacgaggcgtctgtaaagcgttgcataccggggctcgccatcaggtctggcagatagagatctttgatgaacagggacgtctgtgctgttcttcgcgtcttactacagcgattgtgtgacgttgtcaccataaaagtgtgatgcatattgcttttggtcaaaatgtgcgcagaaaaaggtgatatactgtgcacgtttacacataagcgaggatgatatgtctactgatttggacccaacccaactggcgattgaatttttacgccgtgataaaaccgaactttctcccgcgcagtatttgaagcgtttaaaacagctggagttagagtttgccgatctcctcaccctctcagcaaccgaactgaaagaagagatctatttcgcctggcggttgggcgtgcattaataaagtctgtgtaggccggataaggcgttagccgccatccggctatgttaccaggcaatctcaccagaccttgtccccaggtaatagataacccccttgattttgtttaaaaaaaatacagatcgccatttgtgctaaaaaggcgcgctctctttatgagattattcttatgccccttcaagagctaagccattaagagtgccggagataagcgccggatggggccggaacccttaagcctgtattgaacagacttaagggtttttcttttccgggcgcgtaaaaaactaaggtctgtcaataaccgccggcatgtcgtcagccgtatgattattcaaaatacggttagccagcacccctgacatcatcgatccgttaacgttcagtgccgtgcgggccatatcaacgataggttcgatggcaataaaaataccgaccagcgcaacgggaaaattcaacgtcgacaggacaatcagcgccgcgaacgtaccaccgccgccgacgccggctacgccaatagaccctagcgcaatggcaggcaacatcgcggccagaaaatgcagcgagagcggatcgatgccgatggtgggcgcaatcatcgctaccataatagccggataaatcccggcgcagccattttgccccatactggagccaaacgaggcggaaatattggcaatggtgctttgtacgccaaatttttcctgggcggaaatggccagcgggatagaggctgcgctgctgcgggaaacaaacgcaaaggttaagacgggccagaccattctgaaataacgcgctggattattaccgctgaggatcagcaagatggcatgcacgataaacatcataaaaatcgcgatgtaacaggcaccgataaaaccaagtaagctggcgaattgttcaaggcggtatgatgaaaatacggtggtcattaatgccatgacgccatagggcgttaatgcaataacgatacgtaccatcttcatgacccatatctgaatagcgttaatgcctgcgcttaatttctgaccttcttccggcgcctcttttttgacctttaacagagcgatccccgctattagcgtgaagataacgatgccgataacggaaacacttctggctcccgtaagatcaagaaaaatattagtcggaatcagcgatgtcactaactggggaatcgacaccgcggcagtcttattgacttcttccgtagttaacattgacggcatgtgcacaaaagcgctggcgtcaagccccagcacatgagcggtcagtaatccgataaaaccggcaaccatcaccaggcataacatgcatccgacgatcgtcagcgacatttttccgatgccggcactattttccagtttattgatggcggaaagaatagaaataaaaattagcggtatagcgaccagttttagcaggtggacgtaaccattgccgacgatgctgtaccattcgataatagttttagtgtgatttgctgaaataaaatgcagggataaaccaataacagcccctaaaaagatagcgataaaaacgcttttcgacagggaatcgcttttttgattaattctcaagatgacccacgagaaaaccaaaaaaagtgcgatatacgcgagcgtaacaaccatattttaagcctcttgcctcattcagcacctgaaatgccggaaagagtttacataaacctatagctcaaactgagttatagaaccgcagcggattataaagagcgcaacgccaggtatccatacaaaaaatggggttctgacctcgccgcccggcaatgtcgacagcctattaattaaatagtcattttctatacatcttttcgtttttgacctgtcagaacggttaatatcttataaatcattacttatcaaaaagttaagttgttttttgtctgtcgtatgacctggcggacagggtctatgcttaataaaaggcgctcaatatgaccatttgttggaaagcccctgcggttaaggggttgaagtgataatcattatcactaacatgctgttatatcctggtgatttagaacgcgaggtaactctatggaattgcattcagacacgtttaacccggaggacttcccctggcaagggctgacgctaacgccagcggcggcagcgcacatacgtgaactggcagaaaagcagccgggcatgttgggcgtgcggttaagcgtaaaacagacgggatgtgccggatttggctatgttctggataccgttcgggagccggataaagacgatctggtttttgaagccgaaggcgcaaagcttttcgcaccgttacaggcgatgccttttattgacggaacagaagtggattacgtacaggaagggctgaaccagttatttaaatttcataaccccaaagcccagaatgaatgcggctgcggcgaaagttttggggtataggcggtactatgtctcgtaacactgaagcaacggaagaggtcggcatctggacaggcggacgccttaattacaaagaaggatttttcacgcaactacccactgatgaactggcaaaaggcatcagcgaagaggtggtgcgcgcgatttccgcaaagcgtaacgaacctgagtggatgctggaatttcgtctcaatgcctatagagcctggctggacatggatgaaccgcactggctgaaagcgcactacgataaattgaactatcaggactacagctattactctgcgccatcatgcggaaactgcgacgatagctgcgtttcccagccgggagccgtacagcaaacgggcgcgaatacctttttgagtaaagaggttgaagacgccttcgagcagcttggcgttccggttcgcgaagggaaagaggtcgccgtcgatgcgatttttgactcggtctccgtagcgaccacataccgtgaaaaactggcggaacagggcattattttctgttcttttggcgaagcgatacacgatcaccctgacctggtcaggaaatatcttggcaccgtcgtgccggggaacgataacttttttgccgcgctgaatgcggcagtcgcttccgatgggacatttatctatgttcccaaaggcgtgcgttgcccgatggagttatccacctattttcgcattaacgccgagaaaaccggtcagtttgagcgcacgattctggtggcggatgaaggcagctatgtgagttatatcgaaggctgctccgcgcccgtacgcgacagttatcagctccacgccgcggtagtggaagtcatcatccataaagatgctgaagtaaaatattccaccgtacaaaactggttcccgggcgacaacaacacgggcggcattctgaactttgtgaccaagcgggcgttgtgcgaaggggaaaacagcaagatgtcgtggacccagtcggaaaccggttcggcgattacctggaaatacccgagctgcattctgcgcggtgataattctatcggcgagttctattccgttgcgctgaccagtggacatcagcaggctgacaccggcaccaaaatgatccatatcggtaaaaacacgcgctcaaccattatctcaaaaggcatttccgccggccacagccagaacagctaccgtgggctggtaaaaattatgccgacggcaaccaacgcccgaaatttcacccaatgcgactccatgttgattggcgcggactgcggcgcgcatacgttcccgtatgttgaatgccgcaataacagcgcgcagctggagcacgaggcgacaacatcacgcatcggtgaagatcagcttttctattgtctgcaacgcggcatcagcgaagaagacgctatttcgatgatcgtcaacggtttctgcaaagacgttttctcggaactgccgctggagtttgccgttgaagcgcaaaaactgctggcgattagccttgagcacagcgtcggttaatgatgaaggaaaaaccatgttaagcattaaagatttacaggtcagtgtggaagaaaaagcgattttgcgtggcctgaatctggagattcgccccggcgaagttcatgccattatggggccgaacggttccgggaaaagcacgctctccgccaccctggcgggacgtgaagattatgaggtcaccggcggctcggttacgttcaaaggtaaagatctgcttgaactgtcgccggaggaacgggcgggtgaagggatttttatggccttccagtacccggtagaaatccccggcgtcagtaaccagtttttcctgcaaaccgcgctgaatgccgtgcgcgcctaccgcgggcaggcgtcgttggatcgctttgattttcaggatctgatggaagaaaagatcgcattgctgaaaatgccggaagatttactgacccgttcggtaaacgtcggtttttccggcggggagaaaaagcgcaatgatattttgcaaatggcggtgctggagccggaactgtgcatccttgatgagtcggactccggactggatatcgatgcgttgaaaattgtggcggaaggcgtcaacgcgttacgcgacgataaacgcgcttttattatcgtgacccactatcagcgcatactggactacatcaagcccgattacgtccacgtcctctatcaggggcgaattgtccgttccggcgattttactctggtcaaacaactggaggagcagggttatggctggcttaccgaacagcagtaaagcgctacagcaatggcaacatctctttgaagaaaaaggagaaagtcgaactgagcaggcaagacaacatttacaacagatgttacgtctgggattgccgacgcgtaaacatgaagactggaaatacacgccgctggagggcttaacccatagccagtttatccagcagtgtgcgactatcagcgccgcacagcgtgatgcgttggcgctgcaaatcgatgccgtgcgactggtgtttgtcgatggtcggtttatgccagagctcagtgatagcacgcaaaacagcggatttgacgttagcgtcagggatgagcgccaggcgcttgccgcgccggtgcagcctgaggtttttctgcatctgacggaaagcctggcgcaatgtgtcacgtatatacaggtacggcgaaatcagcgtccgacgaggccgctactgttaatgcatatcacgcagggtgtggatggcgacgagctgaataccgcgcattatcgccaccatctggcgctggcggaaggcgcggaagcgacggttattgagcattatgtcagccttacagcggcaaaacattttaccggcgcgcgtctgacgatgaacgttgcagacaatgcgcaactgcgccatttcaaactggcgtttgaaaatgcgtccagctatcactttgcgcataacgatcttctgctggcgacagacgcctcggcgtttagccacagttttctgctgggcgccgcagtactacgtcaccacagcagctcacaactgaatggtgaaaacgcgacgcttcgactgaatagtctggcgatgccggtgaaaaatgaagtctgcgatacgcggacatggctggaacataacaaaggctactgtaacagccgccagttgcacaagaccatcgtcagcgacaaaggacgcgcggtctttaatggcctgattaacgtggcgcaacacgccattaaaaccgacggtcagatgaccaataataacctgttgttggggaaactggccgaagtcgataccaaaccgcaattagagatctatgccgatgacgtgaagtgcagccacggcgcgacgatcgggcgtattgacgatgagcagatgttttatctgcaatcacgcggcatcaggcagcaggaggcgcggcacatgattctttacgcgtttgccgcagagttaacggaagctatccatgatagcgcccttaaacagcaggtgctggcgcgaatcggccagcgactgcccggaggcctggtatgacatttcctgtagaaaaagtacgggcggattttcccatactgcagcgtgaagttaacggcctgccgctggcttacctggacagcgcagccagcgctcaaaaacctaatcaggtgattgatgctgaatctgccttctaccgtcacggctatgctgcggtacatcggggtatccatacgttaagcgcgcaggcgaccgaaagcatggagaatgtgcgtaagcaggcgtcgcggtttattaacgcccgctccgcagaagaactggtgttcgtgcgcggtacgacggagggcattaaccttgtcgccaacagttggggaacggaaaatattcgcgccggggataacattatcatcagcgagatggagcatcacgccaacatcgttccctggcagatgctgtgcgagcgcaaaggcgctgaactgcgcgtgatcccattgcatcctgacggtacgctgcggctggagaccttagctgcgctgttcgatgaccggacccgactactggccattacccacgtttccaatgtgctggggacggaaaacccactgccggacatgattgcgctggcgcgccagcatggggcgaaagtgctggtggatggcgcccaggccgtgatgcaccatgctgttgacgtccaggcgctggactgcgatttttacgttttctccggccataaactttacgggccgaccggcatcggcattctgtatgttaaagaggcgttgctgcaagaaatgccgccgtgggaaggggcgggtcgatgatctcgaccgtcagcctgacgcagggaacgacatgggcgaaagcgccctggcgttttgaggcgggaacgccgaatactggcggcatcatcggtctcggcgcggcgattgattatgtgacgtcgctgggactggataagattggcgattatgagcagatgctgatgcgctatgcgctggagcaactggcgcaggtgcctgatatcacgctatatggcccggcgcagcggttgggcgtcatcgcgtttaatctgggtaaacaccacgcttacgacgtcggcagctttcttgataattacggtatcgcggtacgaacagggcatcactgcgcaatgccgctcatggcctggtatggcgtgccggcaatgtgccgggcttcgctggcgatgtataacacccatgaagaagtggaccgactggtggcaggattaacgcgtatccaccgcttattgggataacagtgaggttttatggctgcgctaccggataaagaaaaactgctgcgtaactttacgcgttgcgctaattgggaagagaaatatttatatattattgagttggggcagcgcctggcggagttaaatccgcaggatcgtaatccgcaaaatacgattcatggctgtcagagccaggtgtggatcgtgatgcggcgaaacgccaacggcattatcgaattgcagggcgacagcgacgcggcgatcgttaagggccttatggcggtggtatttattttgtaccaccaaatgacggcgcaggatattgtgcattttgatgtccggccatggttcgaaaaaatggcgcttgcgcagcacctcacaccttctcgttctcaggggctggaagcaatgattcgcgcaattcgcgctaaggccgccactcttagctaaactgtacagacagcgttctacctgatgtcaaatcctttgtcggacggcgacgtcgctttatccagagtggatagagcgtgtattttgttattctgataagcgaagcgctaccagtcgtcgcagagggcatcaccaggaatacaggaggtttggtatgaaacgtgcgtctttcattacgctaactattatcggcgcgtatagcgcgttacaggcagcctgggcggttgattatccattaccgcccgaaggcagccgtcttattggtcagaatcaaacctataccgtacaggaaggtgataaaaacctgcaggctatagcccggcgttttgatacggcggcgatgctcattcttgaagcgaacaatacgattgcgccggtgcctaagcccggtacgctaattaccattccctcgcagatgctattgccggatgcgcccagggaaggcgttatcgtcaatctcgcggagctacggctgtattattacccgccgggagaaaaccgcgtacaggtgtatcccatcggcatcggtttgcagggactggaaactcccgtcatggacacccggatagggcaaaagatccccaacccgacgtggacgccgacggcaggcatacgccaacgttcgcttgagcgggggatcacgctgccgccggtgatccctgccgggccaaataacccgctgggacgctatgcgctgcgtctggcgcacggtaatggggaatatctcattcatggcaccagcgcgccggatagcgtaggtctgcgtgtgagttccggttgcattcgcatgaacgcgccggacatcaaggcgttatttgcgcaggtcagaacggggacgccggtaaaagtgattaaccagccagtgaaattctctgtcgagccgaatggcattcgttatgtagaggtacacaggccgctatcgccggaagaagagcaaaacgtgcagacaatgccctatgtgttgcctgcggaatttaccgcgttcagaaacgcgcaaggggtggatagtcgcttggtcgataaggcgctataccggcgagccgggtatcctgtcagcgtgagcgccgggcagacgccggcggtaaatacgaccgcagtcgaatccgctcagaacggttttgtcggggaagaggggcaaacgcgcgcgacgcagtagcctttgcagcaaacgacggacaaaaaaatggcgcacgatgtgcgccattttatattgtgcgtcaaattatttacagatgcggaatactttgttgtccagacgttggttcgcgcgagcagcatcgtctttagcagcctgaacgtcggaacgcattgcatttacgtcattactcagttgctcaactttagcgctcagcgtctgtacatcggaagacaactgatcgattttagcgttgcttgaacaacctgccagtaacgtggaacccagaactactgcacctaagatcagctggttagtacggttcataacaataacattatactttgtgtggttatgtgggtaaaaaaaatggcgcacgatgtgcgccatttttattacgcaggtactattacttacggtatttagtagcctggttgtccagacgctggttagcgcgagctgcgtcgtctttagcagcctgaacgtcggaacgcattgcgttcacgtcgttgctcagctggtcaactttagcgttcagagtctgaacgtcagaagacagctgatcgattttagcgttgctggagcaaccagccagcagagtagaacccaggattaccgcgcccagtaccagtttagtacgattcattattaataccctctagattgagttaatctccatgtagcgttacaagtattacacaaacttttttatgttgagaatatttttttgatgggaatgcacttatttttgatcgttcgctcaaagaagcatcgaaatgcatgaaagtccctaaaaaaccgaaagaaaacagggggcttccatcggattcttcttagataatccgcaattagatagtaaaatccgatttgatttttttattaatagtggctatcgattaaataaaaaaagcgccggaagggcgcttttttaaacaaattaattcacacaacaattattacagtacgtgaacagaggcggtgttagtggtgccgcttggaaccagcgcgccggagaccatcactacgacgtcgcctttctgggcgaggccgctttgcagggcgacatctttgcccagacggtagaaatcatcagtagaattgatttctttcaccagctgcgataccacgcctttgctcagtactaactgacgggcggtcacttcattggtggtcaatgccaggatggtggcgtccgggaagtatttacgcacggcgcgagcggatttaccgccctgggtcgctaccacgatcagcggcgcttccagtttttcggcggtttctaccgcgccgcggcatactgcttccgtaatgcgcagtttacggctgtcgttgttgtagtccagacggctgttcatgacgcggtcggtacgttcgcagatggtcgccatgatagaaacggcttccagcgggtatttcccttttgcggattcgccggacagcataaccgcatccgtaccgtcgaggatggcgttcgcaacgtcgcctgcttctgcgcgggtcggacgcgggtttttgatcatagaatccagcatctgagtcgcggtgatcacgactttacgtgcgcggatacatttttcgatcatcattttctgcgcaaaaatcacttcttcaaccgggatttctacgcccaggtcgccacgcgcaaccatgatgccgtcggaagcttcgagaatttcatcgaagttgttcaggccttcctggttttcgatcttagagataatctggatattttcgccgccgtgagctttcagatgctcgcgaatttcgacaacgtcagaacgtttacggataaaggacgccgcaacaaagtcaacgccctgttcgcaaccgaagatcaggtcctgtttgtctttttcagccagcgccggcagagcaatagaaacgcccggcaggttaacgcctttgttctcgcccagatcgccgttgttcagcaccttacaaatgactttattgccttcgatggcggtcacttccataccgatcagaccatcgtcaaccaggacggtgttgccaacgctcaggtcgctggtaaagccttcataggtgacggcaacgatttcattattaccgaccacggatttgtcggtggtaaaagtaaaggtttggcccgctttcagcgaaacgtcgttaccgccttccagtttaatggtgcggatttctggtcctttagtatcaagcagaatagcggcttttttaccagttttgctcatcacgttgcgcaaattctggatacgctgaccgtgttctgcataatcgccatgagagaagttcagacgcatcacgttcatgcccgcgtccagcattttgcttaacatctcttcggattcggttttcggaccgatagtacaaacaattttcgtctttttcatgacagtcttagtctttaagttgaggaggatatggaaatctggcttcgggcgcgcacggcccggaagctaagcctgtgttgctaaagtgatgatgcctcgctctaaggataggtgacatcgaaagagcgtgcagaggaatgtgtgctcgcgtttcagcccaacgggaaggggataattttagtcgttgagttttacagtccaatgcgctgaaaccattcaagagacaattggcgcgcattatacgctgaaatttacaaaaaaggaaaatgaaaaccctgtttcaaaagacatctgtgcagatccacaacggtttgttattacgctgtttacgatgtcgctggcgataacgccgcccgaacaggggcggcgttgcgcaacagcgggtgttgttgcgcataatgtcaatcgagcaactttttgccttccaggtcgatggcgatgttttggttgtgtgcttttcgatagcacagaatcgctatcccgatggccgcccagctaattccgagtatcagagcgtgaatgttcatgtttaaacagacgtagccgatgacgatcatccccatgatcggcgaaatgacatgggcgaaaatgcgccgctgggctttcatccggaaattgaacaggataaacacacacaggttcacgacaaaaaaagcgaaaagcgcgccaaagttcaccagcgtggagatagattcaatcttgccggaaaacaggtagctgagcagcagggtgacgccgccggtaaacagaatggcataatccggcgttttacgcgtggtatggacgtgagcgaggaaggcgggcaacattcggtcgcgccccattgaaaataacactctggacaccgccgtttgcgcggtaataatgttgccgacggcgcacacaaacgccacaatgatggaaaacgccactttgagccagataccgccaacgttgccggcaatggtgaaaaatgcttcattcgtcgcattaccttccgcgaagcggtcgacgttaccggtggcgaacgccgcaaacgccacaacgataataaacagtaccgtcgccaaaactaacgccaacagcgttgctttactgacggcgcgtcccccgccttcgctttcttcacttaatgtactgatagcgtcaaagccgagaaagttcagcgcagccaccgaaatcgccgtcgcgatgagccctggggtgaaccactgtgaatcgaaaaaaggccggaaggaaagcgttatctgactactgtccagcagcatcagacggacaatgagtagcacgaaaatcgccagaataccgagttgaataaagaccagtaacttatcgaatttcgccgtttgctgtatcccgagatagttgactccggtgccaatagccacataaatcaacggccagacccagaccgggatttgcggtaaaatagcgtggaccgcgacgccgcccagcactgccacgagcgtagggaacaaaagataatccagcagtaatatccatccggtcagaaaccctacggcgggattaatgcatacgccagcatacgcataggccgaacccgacgaggagatatgctgcgataaggtagagtagctgtacgcggtaaaaaacatcgcgatcgcgccaataatataaaccagcgcaaccataccgtgcgaaagattataaacgacgccataaagagagactggcgcgataggcaccataaacaccagaccataaagcactaaatcggtaagagacaattttttgacttttttcatgataaataccttaatggctttttatgccagatcgcgtaaaaacgcgcttaccgctgcgaggcagggcgcgatattttcttcatgcgggttatggctgctgccgggaatagtgaccgcgcggcagtctgaaatgtgagagagaagcggagagacgacgcgctcggttgcctgatcgttttcgccgcgtagtaccagaacaggacagcgtatctggcacaaatggggcgtaatatcccagtcggcaagtttgccatttgccgccagttcattggttccccataaaatgtgataaaccgtagggtcggcggcgaactgcgcattagagcgctgaacatgaacggcttcttccgcgagggtataaacgtgtctggcataataagcgaccagctgttccggtgggttttgataaatgacggcgggcataatgacgtttttgatatcgtcatcggacattggcgtcagagcgttaaagagccgtatggcttcctgttgccacagggcgatactggccggcgaactggccagtatcgtcccgcgaagcccggcaggctgtaagcaggcgtgctctgcggcaagcattccgccccaggaatgtcccagtatcgaatacccgtgtccaatacccaggtgatgaattaattgggttaattgacggagataacgcgcaatagtccagaaagacgcgtcagcatgaggaaaatgcgttgaacgaccgcagccatattgatcgtaaaatattaccatgcgcccgtcatcagccagacggcgataatttaataaataatcaaagccgccagaagggccgccatgaaggataatgagcggcgtgagtaatgattttctgtctccataaatccgatagcttgtcaatatgttttcagaaaacatttcgccatagagataagtatcattcatattcttaatgactcagtgtgtggcagggcaggcgaaatttatattcgcctggataatattatttttttattgtgtgtaaaacattacaccagaaggtggcgtaatgttcccattgcagaaactgcggacttccccagtgcggcgaacaatcactggcaaaacaacatactttccctttatggtaagtacccataactaacagtggatcgccattaatttcagcaaggacctgactattttctttggcgataagcttgttatagcccaacagcggcggccattcgctaaatggctgggtaataacatgctctaccgcagtatttactgctttacatccttgcggtagttctacgcggtcatctacatccagcatatcaaccggcaatacttccgccagaaccgtatttttataattggcttttgcttctattcccgtaaaggataaatacccgccgatcattaacagaccgccgccctcagcaacataatcggcgataagttgtaatgcatcaggaataatgtccatattataaaacgttctgttttgtagcaggaacgtattgctaccgatatcactgatgacgatcgcatcatagcaggctaatgcttcggcggtttgtggaaaacgagtttgcacaatatgggcaggcatgtagtccacatcgatattaccctggcgtaagcaggataataaatagtctgcaccttcttcatatttgctcgatgtaaagctatcaaaacctttagagtgaatcatatgaatgtgccaggattcgccaataaataaaattttcattatgtcacctgttaattaatgtgaatgactttattagattgggtacgcattcgatgtaaaacctgcaagtgctgaggcatactcgacgcaccgacttgttccaccgccagagaagcgaaagcggaggcatattgaatggctgcgaccatgtctgcttgtcgcgccagcgcggcggctaaggcgccattaaaagcgtcaccggccccagcggcatcttttaccacggcgctccacgcaggaatatacaacgtgcgggcgtgctcacagatcagagagccacgggcgccaagggtaatgatgacttttttcaccccggattgcagaataatatttccggctttttttgcatcattaatatcagtaatggttacaccggataaaaaagaggcttcagtttcattcggcgtgatgatgtcaatatcagataataaatgcgtcacctgtttcgtatagggggcagggttcagcatgatcattttattttcttgtttgcccagacgaataaattcagtcaacgcttcaatgttcgtttcgagctgcattaacataacgtcagactcggcgatataacggtgttgctcattaatctcttgcgtggtgagcatcatattggcgccagggtagatggcgataatattatcgccatccacggcggagacatagatcaatgcgctaccggtgggtgctttatctgtttgatacgcgctgtatgaggtgatgcctgattgaataatatgattcatagcaaatgcgctgaactgatctttgcccactttaaaaataaaatgtgccgcagcgccagcgttgtttgccgctaaagcctggttggctcctttacctccaggatagaatccaaattgactggccagaatggattctccgctttgtggaaaccacggcacggttgctgaaacatcaatattgaatgagcctaaaacacacaccttgcctgctttttttgggttttcccggcgcagttttgcatcctgatggattggcgtggcgatagtgctggagatatcaatcttattttcagtgataagcttactcagcgcgtcacggtttaaaatccctccgccatagcaacgctgaagcatacctgatttctggaaatagcgtagatcggaacgaatagtctcctggctaaccttataaaggtctgaaagtttactgacgctaacactattatcctttatcagtaaattaatgatggcatgacgtctttcttctttaaacatattgcctccgggtagtgagttgaattgtatttatggcaatgttgtcatgcggtgaattcaatcacagattatgcggtcaaccggaagtaaccccaaatgaatgtcaataatcagaagcgcagccaatgtgttaaatattaattgcttacagaaggggaaaatagttttgtgagtgttgtcatatattttctatgtaatatgacggggtgaacgtaaaatagttgggcttgcacgattcagtgagtatatgcagccggacagcgttcgcttatcagtctctaccctcgacgaaataagacgatatcgctctccggcccgggggttatatacgctcgatttttgccggcagcccctgacgtactgccgcgccagaaacccagtcgagccaggtgttggtaatggttcttgtcggatcggcaaagcccagatcgttaagatttatgcctgccctgatttgtggatcatacggcataggcacgccatccagagagtgctgcgttgcgcccatctcgcggtggccatatccgtgttcgatggcgatgacgcctggcatcacgccatttaacaaactgatttgcgccacgacctgaccgcccggcgtaatgatccgtacccgatcgccatgttgcagtccataacgctcgccgtcttgcggattcagcgccaccaggtttgctggcttcacatggtgtaagcgcgggatgacggctgttgagctggacatggtatttgatttaaatgaaatcagtttcagcggccattgcccaatgggaaactggtcgtcaatcgcacgaccatctgacaaacgcgccggataccagaccgggcaaccgctgaagcgctccccggtgatggcgtgacggtgggcggcgacatctgcattccagatctgtaagggttttttccacgcgttacctaaccgttgctccgtatagccgctatcctcgggcgcaaaccggccgccacgcgagtagataaacgccacgcgaccgacctcatcagctttaagcgtgtgctgaattgctggcagaatgcggctgacgccggtaagcgaaatatcttcctgatttgccagcgcgaccggcgtcttgcccataaaggcgatattagcggctacgcgcagatagaagtcttccgcccggttcagtggaaaagtattgccctgcggatcggttatcgcccggtcgccgaagccgggcagatggagccgttttgctaccgcaatacaaaatgcttccattgagacaggttgcccgtccgccgtgcggtgagtggcgggggcgacaaccggccagcgggcggtagtggctttactggctacgccgccccagggcgccgtaaagccccagctctcaaaattgtgcgtatccggcacaatgtaatccgccagcgccgtcgtttcattcataaaggcgtcaatcgcgataaagagcggcagtcggcgagggtcttttagtttttcttccgccacggcgcgtagaccgggaacaccgtaaaacgggttgctcatattggaaatccaggctttaagcggataaggatagccttcgagcgcggaggtcaacagttcggtaagctggcctgccacaaagggataccacggcgctttggctggataaggggattgcccaccggcaattttgtcgcggtattcttccgatgcttcataagcggttttgctacgggcaatacttaacccggacggtttcacttttccggcaaaactgttcatgttgtagcgggggccgtcgctaacgccgttgaatttgccgccgccgacaaagacgccgccggacaagctgaggttgccgatcagcgcgttaagcatcatgaccgaccaggcgttataaaacccattgccggccatcatgccgccgtgactgatgaccgcagctttacgtccgtgactggtaaaggtttccgccagcgcgataatttgcgcttccggcacgccgcactgttcgctgtattgcgccaacgagagcttttctgccgcctctttcaggcgttgcaacccgctcttcaccgtgacccgttggccgtcggcgagcgtaacgtactgcgtcacgaaaagccgtgcctgtcggcaagtggacgcatcgaccaactcgccgtcggtattcagtacgacaggggtctcttcgccatcgggcgtaagatggcgcagcgtcaggtgttgtccggcaagcgtcggcagctcatccgcaatgaccaggtgcgtggcgttggtccaactttgctcgccggcctgctgcatcgcctgtacgccgggaatcgccagataatcagcattataacgttgattatccatgatccagcggatcatccccattgccagcgccgaatcactgccgggcatgaccggttgccagcgaccgcgaggatcggcgagcaccgttgataaggggagggcgggggcgaccacgacgtattgaaaattctcacgcagtcgggcgctcgccaactgacgtgcctggcgtttaaacggattgccggactgtgccggggaggtgcccataaagagcgcaaactccacgttttcccagtcgggtttgacatgcgggtttttatccagatcgcccatcaatgccccggagccggcccggtaagccagtccacagtaggcgccatgcgcgccgaaattcttgctgccgaagctatttagcgcaaaacgacgcagaaacgcatcgcggccttcgtcgctggtattcgtgaccagtaactgattggttttgggcccgaaactggggtgctttgcgtcaattggcgtatccggcgcatgaatagcgcgcagtccgtccacatgaccttcgccaaacagatcgccgccttccacgacttcttcaataagttgctcaaagctgatgcgctgccatttcccttcgccgcgtttacccacgcgtttcatcggttcaagcagtcgtagcggactgtacaggctttccagcagcgtggcgccgcgcgcgcaggcggttgagcgggcgtcaagaccgctttctcccgccagttgctccatggcttcgctaaaagggacggacgagtcaatcgggtgttcctgcgacaaggggtgatagggattgccggcgatgcgtatcactttgccatcggcattaacccgggcgcggataccgcactgtgtccaacagccgaagcattgcgtcatggcgatggtttgttgtggattttgctgccagtgtgtttgcgcctgcgcctccggaattaacgcattgccaaagatgcggtcgcgcgttaccttgccggacgtcccgtttaacaggccatcaattgcgcgtttcgccacatcacggtagctcagaccaaaagtgaccatcccaccgacggcgagaccgacttttagccactgacgacgggttaaattagccatgttgtaatctcctggtgagtccgttcagcgtttcacgaataataatcagtagcgctatccacaggccgaaggtgccgagaatagccagccagccatccgttccgcctggtaacgagtaagggttaaattgcgcgttgaacttggggacggtttgtacctgaatcaacaatgtccagcgcatcagccaacatagcgccagcgcgctgagaaccagcaggacgcgtcttagctgtgataacggatggcgtagcgccaggctacagaacagcagtgtgcatacccacagcgctacccagccgacagcgtaatatttggctgacagggcgacggtaatccactgacggattgccgtgccggaaagcgtatcgccgctaacccacatggccacaaccagccccagcgccgccagcgtccagatttgtccccacaatatttttggcagccttaccgagtcgtgtcgggcggcgacaatcatcagcgcgaagaatgcctgtaaggcgctaagaaacatcgccacggggaaggcgtagctaaaccagattgggcgcgccagcacaacggagacttcgcggccggtataaatcaacaggcccaccgcgcaaagcgcgctggctaacgccaaccatttagtgacgttgtaacttttattgaataatcgtttaatctgctgcgccaggaaccacagagcgagaaatccggtaaacagcggcaggaataacgctccccagggcatccacgaccagggcgtcggccaggcatagaaatgccagacgcgggcggtctggtgcagatccgccgtcagcgccagcggtgcggtaatcgcacaggtaatggcaatcagtaatgcccgattttcttctgttgcggcgtcttttttccgccagtgaagataacaggcaaacagtgcggcgcaggcggcaatgccaataaaaaagaaatattgtaccgcccacggcagccagctaatgtcctgcgggtgagccagcacttcttcaatgatgagtgaatgcgtcattcagacctcctgccaaagcgcgggctgcgcacggcccattaatggggtgacaaaggcgtcgtccagacccaggtagaaaacatggggcgacgtgccgttttccggctttaataccttgatagcgtcgcgatgctgatgaagcatggtggcgatgcggctatggggatctttgatatcgccaataatacgcgcgccgccgacgcaggactctacgcaagcgggtaacagtccggcttccagacgatggacgcaaaacgtgcatttatcggcagtttgcgtttcatgattgataaatcgggcgtcgtaaggacacgcctggacacaataggcgcagccgacgcagcgtttgttatccaccaccacaatgccatcttcccgctgaaaggtggcttgtaccgggcagaccggcacacagggggggttatcgcaatggttgcacagacgcggcaacagcacattcgtgacttcctgactaccttcacgctggacctggtattggttcaccgtcgtacgaaacgcgccttgcggcgtttggttttcaatagtgcaacttacggtacaggactgacagccgatacaacgccgcagatcgataagcatggcgtaacggtgtcggggagagccttcatgccgctccggcgaaaaaggaaatttcgcttcagccagcggaaccagcgaggcgccagcggtcaggacgccaagctgctggagaaattgccgtttactgctgtccatattgactcccgtccacattgccaacaatgaaacatttgtcacgatgttggttcatgtgtaatgaataaaaaatgtcgatgatttacagtgtaaaaatcgaggcggggtgcgctctattgtggttaaccacatacccggcttgttgttgatctaaaacaacataattgacagggatattggggtgagaggtaaaaccgtaaggcgcctggcggtgttggcggcagtagggctactttgtcatggcgcgtgggcagggacgtggaatatcggtattttggccatgcgcggcgaggcgtctacgcgtagccactggcaaccgttggcaaagacattaagccaacagcttccaggcgaaacctttcacatccagccgctggatctgcatcaaatgcaggaggccgttaaccagggaaccgtgcagtttgtgataaccaacccggcgcaatttgtccaactgaacagccatgcgccgctgcgctggttagcttccctgcgctccacgcgcgatgggaaagcggtgagtaatgttattggcagcgtgattttgacccggcgcgatagcggcatcaccacggcgcatgatctcatcggtaagaccgtcggcgcgattgatgctcaggcgtttggcggctatttattaggctataaagcgctcagcgacgcgggcttacgcccggagcgcgattttcatctccgttttaccggatttcctggcgatgccttagtctatatgctgcgcgaaaaagcggtgcaggcggcaattgtgccagtgtgcctgttagaaaatatggatcaggaaggattgattaataaaaaggactttatcgcgctgctttcccgaccgacgcccctgccttgcttaaccagtacgccgttatatcctgactggtcgttcgcggcgctacctgcggtaagcgatgcgctggcggatcgcgtaacgcgagcgctattcaacgcgcccgccgccgcgtcatttcactggggcgcgcctgcgtccaccagtcaggtggaagccttgctgcgtgatgttcgtcagcaccctcagcagcgtcgactgtggctggatgtcaaaagttggttaatccagcaccagctaatggtcggcggcgtgattctggcgttcttgttgctcacgctcaattatatttgggtcatgctgctggtgcgtcgacgtggaaagcaactggaacgtaatagcgtagttcttcatcagcatgagcgggcgctggaaaccgcccggcaaatgagcgtgttgggtgaaatgacctccgggtttgcccatgagcttaatcagccgctttccgcgattcgacattatgcccaggggtgcctgattcgactgcgcgctgcagatgaacagcatcccttgctgccggcgctggagcagattgaccagcaggcgcaacgcggtgcggatactctgcgtaacctgcgtcactgggtcagccaggcgcagggcaacccggtgctaaccgaagcgtggaaggccatagccattcgcgaggcgattgatcatgtctggcaattgttgcgtatggcgcaacagtttccgacagtgactctgcataccgaggttagcgctgcgctgcgcgtaacgctgccgtcagtgctgctggaacaggtgctggcgaatatcattcttaatgcggctcaggcgggcgccacccatttatggatcgttgctgaacgcactgaaaacggcatcagtattgttttacaggataacgccgggggaatcgatgaggcgctattacgtcaggcgtttcagccgtttatgaccacccgtaaagaggggatgggcttagggctggcgatttgccagcggctggtgcggtatgggcggggcgatatcagcatcaggaaccagaccgcgccggacggtctgtcgggaacggtggttacgatacatttcttacatgaaaatgggggcagggatggcgacaattcatctactggatgatgatacggcggtcactaacgcgtgcgcgtttttactggaaagtctgggatatgacgtaaaatgctggacgcagggggcggattttttggcgcaggccagtctgtatcaggccggggtcgtattactggatatgcgaatgccggtactggatgggcagggcgttcatgatgcgttgcgccagtgcggaagtaccctggcggttgtttttcttaccgggcatggcgatgtaccgatggccgtggagcagatgaaacgcggcgccgtcgattttctgcaaaaaccggtatcggtaaaaccgctacaggcggcgctggagcgtgcgctgacggtttcatcggcagcggtggcgcgtcgtgagattatactgtgttaccagcagttgacgccgaaagagcgtgagctggccagcctggtggcaaaaggatttatgaaccgtgaaattgcggaagcgatgaatatcgcggtgcgtaccgtagaggtgcaccgcgccagagtcatggaaaaaatgcaggccggtagcctggcggaactgattaggcgtttcgaaaaaatggcctcgccagagaccagaatacgaacaacgtatgagccatgaataataaaccgcgttatttctttgatttgcatcaaattttgtttaatagagaagactgttatattctgttggtttgatctggcgacgagtaaaacgtatgacaaaaccgacaaaagatgacgaactgtaccgcgagatgtgccgggtggtgggcaaggtcgtgctggaaatgcgcgatctggggcaggagcctaaatatattgttattgcgggcgtgttaagaaccgcgctggcgaatcaacgcatccaacgtagcgcgttagaaaaacaggctatggaaaccgtgattaacgctctggcgcggtcatagccgctatcagggtggcaataacgacatcgcctttgaattgtcgcgattgtcaccatggcgggcgggttacccgccgttagcgatgcgcagggttatcaggtgatggctaagcgcagccctaatgtatcagggtacggctcaaaataattctggctgcgtagatagtcatccggatgttccgccagatagtgcttcagcagcgttaacggtgccaggataggtagtcggcccgcccggtagccgagaatcacctcgcgtaattccgcgcgttgcctgctgttcaacgcgcggtgaaaatagccctggatatgcatcagcacattggtgtgatttttacgtgaagcggggtggcgcaggatagccatcagtttttctctgtatcggacaaagaaggcatccagatcgtcccactcatgcagacgcgcgacgaaagggccaatttcgcggtagccggcctggtggtgggcgagaagctgaagtttgtatcggctatgaaacgcgagcaaactgtgacgactcaagccctgcgcgcgtagcgcatttaattcatgtagcgcgaagatacgtgcgatgaaattctcgcgtagtaccggatcgtgcaggcgaccatcttcctctatcggcagccagggatatttgtccatcatcgcggcggtaaacagccccgtgccagctttgcggcccctgttacccttttcatcatacaggcgaacgcgctccattccgcaactgggcgattttgcacacacaataaaccccgccagttcgcctattgttggcagaaaccgatcagcaaaggcattcattcgctcggtgacgtcatcgtgcggggcatggctatagcgcatccgaatgtcgccacaggtcgtctggataagacgcagcgcagggcggggcacgggcaggccgatcgccacctccgggcagatcggtttgtaggccacccacggcgccagagagttcatgacaaaatccatacgcttatgtccgccatcaaagcgtaccgtggcgccagtcagacatccgctaatgccgactacgggtttgttattcatgattcccccttattgaaagtacgacgactgacgccaatggcgcaaaatgttatctcacgctgatttaaaacttacacaactttgtttttttgtctaagttttcgcggagattttttttgacgtaattaaatatcaataagatagaatgaggggaagaaatctatttcagcgcctatagtgtgataacctccagcgaagcgaccacgttgcgccactgggcaagctgttttttctgcccggcagtgagctttccggtggtcaccaggaaccattttctctgggcgaacagctcgggcgccagcacaactgggggcgagggaagcacattgagccgcagctcttgtccggtacgagtcaacgcttccagccagatttcacagtgatccgagagattccatccgctaataaaggcattgttgccaggcgcttttctgtcgccttcaaggcaaaaagaggtgtaggcaataatgatgccatccagtatttcgcgcagcgtcatcacggcgggaagatgcgcggacactttgctgcgcaacggacgcaataaatgggtcaccagttctgcgcggggatattcccggccacagtcataaatcaactgccgcagcgcgtcaattcgcccttcgtggagatgttgaagcatcgtctcctggatcgttatccagttatcgcccaggcgaataaccggacgcgacagtaaggggttgacctggcttatcggtacgccttttctcacccagtcgagaatgctaagcgcttgtcgaatatcgtcatcgctgtataagcgatgtccgccatcagtacgctgcggtttcaataaaccatagcgtcgctgccatgcccttagcgtggcggcattgataccgcatagtctggcaaattcgccgatagaatacgacatggtaaagcccgttaaataaggggattctactatatcatgatcaaatgaagactaaggtagtgataaatggtgcggcataccagggcatccgtatggattttgtcgatgatgagcaatactgcgtggcgtaaggctcatcaaaatatgaccaatgcttaataccatcggacgcccctggttaatactctattaacctcattcttcgggcacagttaagtaactctgtcactttatgaacctgtagctttctcatcatattcatccggtgtgtttcgacggtttttatactgatatgtagcttttcgctgatcccatgattggtatacccctcgtcaataagtttaagaacctgacgctcgcgcaaagtaagcagttgatgattggtcgtgtcagcgtttaattcagccaggatagcttcccgattcaacgttgggtcaatgtaacgcttgtttactgctactgtttgcaatgccgctaacagaacttgctgactactgctttttaaaacatagccattagcacctgcggctaaagttttaatggtcatatactcttgttggtatgctgtgtaaaccagaatattcattgctggccaacgctgatgtaattgaggaatgatatccaggccattgatgccaggtagactaagatcaaggataagtatgtcaggctcgtatgcacaacaggcattataaacctcaagaccatttttaacatgctctacaattttaaaatgaggccagggtaataaggcattcataatgccgttaatgatgatttcatgatcgtctactaataagatcttatattctttcattttgctgccctcgcgaaaattaagataatattaagtaatggtgtagtttttgaagatcatacgtattttctggcgtaagtcggttagttcctccagcgcgatgattttccccatttttacgcgattctcaatgtctatgacatagcataccaattcagtctgccctatttgacctaaacagccttttaatgtgtgaattaactgatcgattttttctccagccgatacggcattttcaatatcagccagcaagaggtccagtgattggaaaatcttgctattaatgaccatatcatctgtcgccagtagcgctgagcagcgactcggatcctgctcctgtagctctatatttcgtaaaagttggtattctgcggcaatactgatgtagcgagctaaggtagccaatgtcactggttttgtaatgtaatgatgaatcccattttttttacaacgatgaatatcttctgtcgctacgctagcggatagtgccacaaacatgcagtcaggatctaaattattcggctcatcatgccataatcgtacacattcaataccatctatttctggcattctaatgtcaatcagtactaaatcgaatcgctgctgttgtgataaagtcagagcctcgttactactggcggcaatagtgacgtgttggcccaggctgacaagcattttgccgatgatatcccgattaatatcggcatcatcaaccaaaagaatctgcaactgccagggtggtaacaaattatttattactggcatatttggtgtacacaatattaactgttgcgccaggtcgtagagttttccggagaaatacaaaagctctgcgttgagaagcgcattttgctggtggggtggttcaccgcgtattccccagcaagccagttgccgatgcaggcagaacggcgctgacagcgtccctttaattggttgaggcggctggtattcttgtaagggtaatactagcgagacacaggttccaaccccggggacactttttagtgtcagattaccgcccatcattttagccaggcttgacgcaatagtcagtccaattcctgtaccttgcgaatttgtgtctgcttgataaaaagcagtaaagatttgagactgctgctgtatttcaatccctttaccgctatcgctaaccagaaatattaattgttcctcatgacgcttgaccgtcagacgtatccctccggtttcggtaaattttaccgcgttcccgagtaaattaaccaaaatttgccgtaaacggatactgtcggtatgaaaatagagagggacatgttgaccgacaaaagtacgtaatgacagttttttgctttgcgctggcccctggatggtttgcattgcctggtccagtaacggcagtaacgctgtttcttccatatgtaatgtgaaatgaccagactcgatgcgtgaaaaatccagcagattattaataatagctaacaaagacagtgtacaatttctggcggtatcagctaatccttgttgctctatgtttaaaggggtggtttgtaataattcaattgcaccgagtacgccattcatcggagtacgtaactcatgacttattaccgtaagatgaatgcttttacgtttgttagctcgctcagcgcgtttttttgcttcatttagcgcctgggtgcgctctgcgactttgttttccagattgtcgtattggacttgtagagtatcaagcagttggttaaaagcaccggcaatactatctaattcatccagtcgttgtgctggtaaacgtgtgctcagcggtgcagttgcggttttattaatgacatcgacaaaacgccataacggtttggccagtgagcgatgtagtaaccagcaaaaagccgacgtcatcaacaccaatgctgttaatgtaaaggggatttgttgaaggataatttttaagatgcgattatgtagattaccgtatgggtacagcgtaaccagactccatccggggccatgcaaggttgtgcgtaatatcagaaatccgggaatttgctgccatccatcatgcagcgttacattttctaactgtgtacgtattttttgcgggatgtatgaaaacggcaataagtggttgttttgatccagccatactcgaatactatcatctaatggcaggtggctcttagtaatgagatcgggaagtttaaccgtcacctcaaaaaatacgccttgctgatcggcaaccgcaacggaagcgtgccatcctttgccgtttatgtattctggttcactccagtaaaacccggcatgggttgggtataaaggaaagctttttcgcgttaaaggctgtagagttgaataatctgaagggttatcagtagataataacgaaatctcatttttatgattaagaataaaactatcgcgacgaaagctattttcatcgatatcagaggactgcagaaagagacggtgcttctctccgtttagcgtcggcgtgcaatttgaaggaccgacagatagatgccggctcacctcagggaaaatatcgttatgatgaatctcagtcgctaatgagcattgatacattaaatttttagcgtcacgttcagcttcttcaaaccgttgattgcttagtacaatattcatctcggatagaacggataaatcctctattatatgctgccgtttctgaaccattgatatataagctgcggtaagcacagatagcagccaaataattattgttgttaataaaaataaaaaagttagcctgattactaaagatgtttgcagcgtattcttgagattgagcaaattcataatgcttccctccagttgcctgttgcaaaatctttggcacttgatcactatcgcagtacatatagtttcatcagaagattaatcgatggtgttatcattaggaagataaatttcttcatatataacccagtcgatgactacaattactttttaataagatggcgatgtaaaaacatcgtaacagtttatttaataaataatttttcaaattgtaagtttttatgtcaatgctgaaaatgtaattgtgaatttatcggaaaatccgaatgatagaatcgcctgtgacaaggtatatgtagacagcatcctgatattgtacaagaagagtatagtcgaaataaatgtgaatcaggctttttacggatgtggttgtgagcgaatttgatagaaactcccatttatgtctgaggagggattcatgctggcagttttaaaaggcattccattaattcaggatatcagggccgaaggtaatagccgatcctggataatgactattgatgggcatcctgccagaggagaaattttctcagaagcattttctatttctttgttcttaaatgacctggaaagcttacctaagccttgtcttgcctatgtgacactactgcttgcagcacacccggacgtccatgattatgctatacagctcacagcggatgggggatggttaaacggttattataccacaagtagtagctctgagcttattgctattgagatagaaaaacacctggctttaacttgcattttaaaaaatgtaatacgcaatcaccataaactttattcgggtggggtataaaatggtagtaaataaacgtttaatcttaattttactatttatactcaatacagcaaagagtgatgagttatcatggaaaggtaatgacttcaccctttatgccagacaaatgccattagcagaggttttacatctgctctcagagaactatgatacggctattactattagcccattgataacagctacatttagtggaaaaattccgcctggaccaccggtcgatattttgaataacctggcagcacaatatgatttgcttacctggtttgatggcagcatgttatatgtatatcctgcatcgttattaaaacatcaggttatcactttcaatattttatctactggacggttcattcattacttacgcagccagaatatcctttcatcaccgggatgcgaggttaaagaaattaccggtaccaaagctgtggaggtgagcggtgttcccagctgcctgactcgtattagtcaattagcttcagtgctggataatgcgttaatcaaacgaaaagacagtgcggtgagtgtaagtatatacacgcttaagtatgccactgcgatggatacccagtaccaatatcgcgatcagtccgtcgtggttccaggggtcgttagtgtattgcgtgagatgagtaaaaccagcgtcccgacgtcatcgacgaacaatggttcacccgctacacaggcattgcccatgtttgctgccgacccacgccagaatgcagtgatcgttcgtgattatgcggccaatatggccgggtatcggaaactcatcacagaattagatcaacgccagcagatgatagagatttcggtgaaaattatcgatgttaatgctggagatattaaccagttaggcatcgactggggaacggcagtgtcgctgggtggcaagaaaattgcgttcaatacaggtttgaatgacggtggtgctagtggtttttcaacggtaatcagcgatacctcaaactttatggtgcgtctgaatgccctggaaaaaagctctcaggcttatgtactttcccagccatctgtggtgactttaaataatatccaggctgtgctggataaaaatattactttctataccaaactgcagggagaaaaagtggctaaacttgaatccatcactacgggttctttgttacgcgttacacctcgcttgttaaatgacaatggcacgcaaaaaataatgcttaatcttaatattcaggatggacaacaaagtgatacgcaaagcgaaacagacccgctgcccgaagtgcaaaattctgaaattgcttcgcaagccacattattggccgggcaaagtctattgctgggagggtttaaacaaggtaaacaaatccactcgcaaaacaaaatccctttattgggcgatattcctgttgtaggtcatttgtttcgcaatgatacgactcaagtacatagtgtaatcaggctttttttgattaaagcctcagtagtaaataatggcatatctcatggttaatccaaagagttcctggaaaatacgttttttaggtcacgttttacaaggccgggaagtatggctgaatgaaggtaacctgtcactgggggagaagggatgcgatatttgtattccgctggctataaatgaaaaaattattctgagagaacaggcagatagtttatttgttgatgccgggaaagccagagttagagttaatggccgcagatttaatccaaataagccgctaccatccagtggggttttgcaggttgcgggagtggctatcgcgtttggtaaacaggattgtgaacttgctgattatcaaatacccgtttccagatcagggtactggtggttggctggcgtattcttgattttcatcggtggaatgggtgtcctgttaagtattagtggtcagcctgaaacggtaaatgacttacctttgcgggttaagtttttattagacaaaagcaatattcattatgtgcgggcgcaatggaaagaagatggcagcctgcagttgtccggttattgctcgtcaagcgaacagatgcaaaaggtgagagcgactctcgaatcatggggggtcatgtatcgggatggtgtaatctgtgatgacttattggtacgagaagtgcaggatgttttgataaaaatgggttacccgcatgctgaagtatccagcgaagggccggggagcgtgttaattcatgatgatatacaaatggatcagcaatggcgcaaggttcaaccattacttgcagatattcccgggttattgcactggcagattagtcactctcatcagtctcagggggatgatattatttctgcgataatagagaacggtttagtggggcttgtcaatgttacgccaatgcggcgctcttttgttatcagtggtgtactggatgaatctcatcaacgcattttgcaagaaacgttagcagcattaaagaaaaaggatcccgctctttctttaatttatcaggatattgcgccttcccatgatgaaagcaagtatctgcctgcgccagtggctggctttgtacagagtcgccatggtaattacttattactgacgaataaagagcgtttacgtgtaggggcattgttacccaatgggggagaaattgtccatctgagtgccgatgtggtaacgattaaacattatgatactttgattaactatccattagattttaagtgagtggaaaatgacaactttgacccggttagaagatttgctgcttcattcgcgtgaagaggccaaaggcataattttacaattaagggctgcccggaaacagttagaagagaacaacggcaagttacaggatccgcagcaatatcagcaaaacaccttattgcttgaagcgatcgagcaggccgaaaatatcatcaacattatttattatcgttaccataacagcgcacttgtagtgagtgagcaagagtaaagtaaaaatatcttagagcctatcccaccaggcgttaattggcgcagccagtttggacacggatagcgcgcaaaaaccgcagcgtacacgtagtactgagagatcccctcataatttccccaaagcgtaaccatgtgtgaataaattttgagctagtagggttgcagccacgagtaagtcttcccttgttattgtgtagccagaatgccgcaaaacttccatgcctaagcgaactgttgagagtacgtttcgatttctgactgtgttagcctggaagtgcttgtcccaaccttgtttctgagcatgaacgcccgcaagccaacatgttagttgaagcatcagggcgattagcagcatgatatcaaaacgctctgagctgctcgttcggctatggcgtaggcctagtccgtaggcaggacttttcaagtctcggaaggtttcttcaatctgcattcgcttcgaatagatattaacaagttgtttgggtgttcgaatttcaacaggtaagttagttgctagaacccatggctcctttgccgacgctgagtagattttaggtgacgggtggtgacaatgagtccgtgtcgagcgctgattttttcggcctttagagcgagatttatacaatagaatttggcatgagattggattgcttttagtcagcctcttatagcctaaagtctttgagtgactagatgacatatcatgtaagttgctgataggtttccagttttccgctcctaggtctgcatattgtacttttcctcttactcgacttaaccagtaccaacccagcttctcaacggatttataccatggcactttaaagccagcatcactgacaatgagcggtgtggtgttactcggtagaatgctcgcaaggtcggctagaaattggtcatgagctttctttgaacattgctctgaaagcgggaacgctttctcataaagagtaacagaacgaccgtgtagtgcgactgaagctcgcaataccataagtcgtttttgctcacgaatatcagaccagtcaacaagtacaatgggcatcgtattgcccgaacagataaagctagcatgccaacggtatacagcgagtcgctctttgtggaggtgacgattacctaacaatcggtcgattcgtttgatgttatgttttgttctcgctttggttggcaggttacggccaagttcggtaagagtgagagttttacagtcaagtaatgcgtggcaagccaacgttaagctgttgagtcgttttaagtgtaattcggggcagaattggtaaagagagtcgtgtaaaatatcgagttcgcacatcttgttgtctgattattgatttttcgcgaaaccatttgatcatatgacaagatgtgtatccaccttaacttaatgatttttaccaaaatcattaggggattcatcagcacgtagtacgtgaggtttgactcgctacgctcgcccttcgggccgccgctagcggcgttcaaaacgctaacgcgttttggcgagcactgcccaggttcaaaatggcaagtaaaatagccctaatgggataggctcttagttagcacgttaattatctatcgtgtatatggaggggaatgatgataaagaaaaaggctgcgtttagtgaatatcgtgatttagagcaaagttacatgcagctaaatcactgtcttaaaaaatttcaccaaatccgggctaaggtgagtcaacagcttgctgaaagggcagagagccccaaaaatagcagagagacagagagtattcttcataacctatttccacaaggcgttgccggggttaaccaggaggccgagaaggatttaaagaaaatagtaagtttgtttaaacaacttgaagtacgactgaaacaacttaatgctcaagccccggtggagataccgtcaggaaaaacaaaaaggtaaagcataatgtcttcaggaaacatcttatggggaagtcaaaaccctattgtgtttaaaaatagcttcggcgtcagcaacgctgataccgggagccaggatgacttatcccagcaaaatccgtttgccgaagggtatggtgttttgcttattctccttatggttattcaggctatcgcaaataataaatttattgaagtccagaagaacgctgaacgtgccagaaatacccaggaaaagtcaaatgagatggatgaggtgattgctaaagcagccaaaggggatgctaaaaccaaagaggaggtgcctgaggatgtaattaaatacatgcgtgataatggtattctcatcgatggtatgaccattgatgattatatggctaaatatggcgatcatgggaagctggataaaggtggcctacaggcgatcaaagcggctttggataatgacgccaaccggaataccgatcttatgagtcaggggcagataacaattcaaaaaatgtctcaggagcttaacgctgtccttacccaactgacagggcttatcagtaagtggggggaaatttccagtatgatagcgcagaaaacgtactcatgaaaaaagacccgaccctacaacaggcacatgacacgatgcggtttttccggcgtggcggctcgctgcgtatgttgttggatgacgatgttacacagccgcttaatactctgtatcgctatgccacgcagcttatggaggtaaaagaattcgccggcgcagcgcgactttttcaattgctgacgatatatgatgcctggtcatttgactactggtttcggttaggggaatgctgccaggctcaaaaacattggggggaagcgatatacgcttatggacgcgcggcacaaattaagattgatgcgccgcaggcgccatgggccgcagcggaatgctatctcgcgtgtgataacgtctgttatgcaatcaaagcgttaaaggccgtggtgcgtatttgcggcgaggtcagtgaacatcaaattctccgacagcgtgcagaaaagatgttacagcaactttctgacaggagctaaaaatgaatcgaattcacagtaatagcgacagcgccgcaggagtaaccgccttaacacatcatcacttaagcaatgtcagttgcgtttcctcgggttcgctgggaaagcgccagcatcgtgtgaattctacttttggcgatggcaacgccgcgtgtctgctatccgggaaaattagtcttcaggaggcaagcaatgcgttgaagcaactgcttgatgccgtacccggaaatcataagcgtccatcattgcctgactttttgcagaccaatcccgcggttttatcaatgatgatgacgtcattaatactcaacgtctttggtaataacgctcaatcgttatgccaacagcttgagcgggcaactgaggtgcaaaatgcattacgtaataagcaggtaaaggagtatcaggagcagatccagaaagcgatagagcaggaggataaagcgcgtaaagcgggtatttttggcgctatttttgactggattaccggcatatttgaaaccgtgattggcgccttaaaagttgtggaaggttttctgtccggaaatcccgcagaaatggctagcggcgtagcttatatggccgcaggttgtgcaggaatggttaaagccggagccgaaacggcaatgatgtgcggtgctgaccacgatacctgtcaggcaattattgacgtgacaagtaagattcaatttggttgtgaagccgtcgcgctggcactggatgttttccagattggccgtgcttttatggcgacgagaggtttatctggcgcagctgcaaaagtgcttgactccggttttggcgaggaagtggttgagcgtatggtaggtgcaggggaagcagaaatagaggagttggctgaaaagtttggcgaagaagtgagcgaaagtttttccaaacaatttgagccgcttgaacgtgaaatggctatggcgaatgagatggcagaggaggctgccgagttttctcgtaacgtagaaaataatatgacgcgaagcgcgggaaaaagctttacgaaagagggggtgaaagccatggcaaaagaagcggcaaaagaagccctggaaaaatgtgtgcaagaaggtggaaagttcctgttaaaaaaattccgtaataaagttctcttcaatatgttcaaaaaaatcctgtatgccttactgagggattgttcatttaaaggcttacaggctatcagatgtgcaaccgagggcgccagtcagatgaatactggcatggttaacacagaaaaagcgaagatcgaaaagaaaatagagcaattaataactcagcaacggtttctggatttcataatgcaacaaacagaaaaccagaaaaagatagaacaaaaacgcttagaggagctttataaggggagcggtgccgcgcttagagatgtattagataccattgatcactatagtagcgttcaggcgagaatagctggctatcgcgcttaatctgaggataaaaatatggaagcgagtaacgtagcactggtattaccagcgccttccttgttaacaccttcttccactccatctccctccggggagggaatgggtactgaatcaatgcttctgttatttgatgatatctggatgaagctaatggagcttgccaaaaagctgcgcgatatcatgcgcagctataacgtagaaaaacaacggctggcctgggaactgcaagtcaatgttttacagacgcaaatgaaaacaattgatgaagcgtttagagcatcaatgattactgcgggtggcgcaatgttgtcgggtgtactgacgataggattaggggccgtaggcggggaaaccggtcttatagcgggtcaagccgtaggccacacagctgggggcgtcatgggcctgggggctggtgtagcgcaacgtcaaagtgatcaagataaagcgattgccgacctgcaacaaaatggggcccaatcttataataaatccctgacggaaattatggagaaagcaactgaaattatgcagcaaatcatcggcgtggggtcgtcactggtcacggttcttgctgaaatactccgggcattaacgaggtaaacatggtgcaagaaatagagcaatggttacgtcggcatcaggtgtttactgagcctgcatatttaggggagaccgccatattacttgggcagcagtttatattatcgccttacctggtgatctatcgtattgaggcaaaagaaatgattatttgtgagttcaggcgcctgacgcccgggcaacctcgaccacagcaattgtttcacttactgggacttttacgcgggatatttgtgcatcacccgcagttaacatgtttaaagatgttgataatcaccgacgttctggatgaaaaaaaagccatgctacgcaggaaattattgcgcatcctgacagtaatgggagcgacctttacacagcttgatggcgataactggacagttttatccgccgagcatcttatccagcgacgtttttaaatgaccttcctgacgtaaatcattatcacgtgaaaataacaatcaataggtatgatgatgaaagaagatcagaaaaataaaatacccgaagacattctgaaacagctattatccgttgatccggaaaccgtttatgccagtggttacgcctcatggcaggagggggattattcgcgcgccgtaatcgattttagttggctggtgatggcccagccatggagttggcgtgcccatattgcattggctggcacctggatgatgcttaaagaatacacgacggccattaatttctatggacatgccttgatgctggatgccagccatccagaaccggtttaccaaacgggcgtctgtctcaaaatgatgggggaacccgggttggcgagagaggcttttcaaaccgcaatcaagatgagttatgcggatgcctcatggagtgagattcgccagaatgcgcaaataatggttgatactcttattgcttaaataacagaacgaaatatgaaaattcatattccgtcagcggcaagtaatatagtcgatggtaatagtcctccttccgatatacaagcgaaggaggtatcgtttcctccccctgaaattccagcgcctggcacccccgcagcccctgtgctgcttacgcctgaacaaataaggcagcagagggattatgcgatacattttatgcaatacactattcgtgcgctgggtgcgacagtcgtgtttgggttatcggttgctgcagcggtaatttctggcggggcaggattacccattgctattcttgcgggggcggcgctcgtgattgctattggggatgcttgctgtgcgtatcataattatcaatcgatatgtcagcaaaaggagccattacaaaccgccagtgatagcgttgctcttgtggtcagtgcgctggccttaaaatgtggggcaagtcttaactgcgctaacacccttgctaattgtctttctttattaatacgttcaggaatcgctatttctatgttggttttacccctacagtttccactgcccgcggctgaaaatattgcggcctctttggacatggggagtgtaattacctccgttagcctgacggcgataggtgcggtactggattattgccttgcccgcccctctggcgacgatcaggaaaattctgttgatgaacttcatgccgatcccagtgtgttattggcggaacaaatggcagcgctctgtcaatctgctactacacctgcattaatggacagttctgatcatacatctcggggagaaccatgaaacctgttagcccaaatgctcaggtaggagggcaacgtcctgttaacgcgcctgaggaatcacctccatgtccttcattgccacatccggaaaccaatatggagagtggtagaataggacctcaacaaggaaaagagcgggtattggccggacttgcgaaacgagtgatagagtgttttccaaaagaaatttttagttggcaaacggttattttgggcggacagattttatgctgttccgctggaatagcattaacagtgctaagtggtggaggcgcgccgctcgtagccctggcagggattggccttgctattgccatcgcggatgtcgcctgtcttatctaccatcataaacatcatttgcctatggctcacgacagtataggcaatgccgttttttatattgctaattgtttcgccaatcaacgcaaaagtatggcgattgctaaagccgtctccctgggcggtagattagccttaaccgcgacggtaatgactcattcatactggagtggtagtttgggactacagcctcatttattagagcgtcttaatgatattacctatggactaatgagttttactcgcttcggtatggatgggatggcaatgaccggtatgcaggtcagcagcccattatatcgtttgctggctcaggtaacgccagaacaacgtgcgccggagtaatcgttttcaggtatataccggatgttcattgctttctaaattttgctatgttgccagtatccttacgatgtatttattttaaggaaaagcattatggatattgcacaattagtggatatgctctcccacatggcgcaccaggcaggccaggccattaatgacaaaatgaatggtaatgatttgctcaacccagaatcgatgattaaagcgcaatttgccttacagcagtattctacatttattaattacgaaagttcactgatcaaaatgatcaaggatatgcttagtggaatcattgctaaaatctgaagttattagcgacgatgttcgacggttgctgctggaaatcatgtttgcgggcgttaaccatagcctgatttcccaggtacatgcgatgttaccagcgctaacggttattgttccggataaaaaattacagttggtatgtctggcattattgttggcgggtttaaatgagccgctaaaagccgcgaaaattttatcggatatagatttgccagaggctatggcgctgcgtctgttatttcctgcaccaaatgaggggtttgaaaattgaatatttctgatatgagcgtagtgcctgtaagcactcaatcttatgtaaagtcctctgcagaaccgagccaggagcaaattaatttttttgaacaattgctgaaagatgaagcatccaccagtaacgccagtgctttattaccgcaggttatgttgaccagacaaatggattatatgcagttaacggtaggcgtcgattatcttgccagaatatcaggcgcagcatcgcaagcgcttaataagctggataacatggcatgaaggttcatcgtatagtatttcttactgtccttacgttctttcttacggcatgtgatgtggatctttatcgctcattgccagaagatgaagcgaatcaaatgctggcattacttatgcagcatcatattgatgcggaaaaaaaacaggaagaggatggtgtaaccttacgtgtcgagcagtcgcagtttattaatgcggttgagctacttagacttaacggttatccgcataggcagtttacaacggcggataagatgtttccggctaatcagttagtggtatcaccccaggaagaacagcagaagattaattttttaaaagaacaaagaattgaaggaatgctgagtcagatggagggcgtgattaatgcaaaagtgaccattgcgctaccgacttatgatgagggaagtaacgcttctccgagctcagttgccgtatttataaaatattcacctcaggtcaatatggaggcctttcgggtaaaaattaaagatttaatagagatgtcaatccctgggttgcaatacagtaagattagtatcttgatgcagcctgctgaattcagaatggtagctgacgtacccgcgagacaaacattctggattatggacgttatcaacgccaataaagggaaggtggtgaagtggttgatgaaatacccttatccgttgatgttatcgttgacaggactgttattaggagtgggcatcctgatcggctatttttgcctgagacgccgtttttgagccgacctgatcccgaggtgttgcaactttatcgttatttctggcaacctgctcgttacgctgtaccggaatggctggataagctgggctttcatctttcaaactgctggcgttatggcgatcggcccgagttggatcgtcttcttgacagagcgttaaatagactaagaggaagctctgttattccagcctgtttaaatgacaggcaaaaacggcaggttcgtcttgcgccgcgtatatcggcatttgcctttgggctgggattattcaaactcaggtgtagtgactattttatgctaccagagtatcggcaattgcttctacagtggtttagcgaggatgagatctggcagctatatggttggttggggcaaagagatggcaaattacttcctccgcaagtgatgcaacaaactgcattgcagatcggtaccgccattcttaatcgggaagcgcatgacgatgcggttttacatgcgctattagtattattaccccctccgcagcgtatactttggccgaagacttctcttaccgagattatcttcatggagcatttgctatgagttttacttcacttcctctgacggaaattaaccataagctacccgctcgaaatattattgagtcacagtggataacattacaattaactttatttgcgcaagagcaacaagctaagagagtttcacatgctattgtgagctccgcttaccgtaaggctgaaaaaatcatccgagacgcctatcgttatcagcgtgaacagaaagttgagcagcaacaagaactagcgtgcttgcgtaaaaatacgctggaaaaaatggaagtggaatggctggaacagcatgtaaaacatttacaagacgatgaaaatcaatttcgttcattggtcgatcacgcagcgcatcatattaaaaatagtatagaacaggttctgttggcctggttcgaccaacagtcggtagacagtgttatgtgccatcgtctggcacgccaggccacggctatggcggaagagggagcgctttatttgcgtattcatcctgaaaaagaggcattgatgcgagaaacttttggcaagcggtttacgttgattatcgagcctggtttctctcccgatcaggctgaactttcctcaacacgatatgccgttgaattttcactttctcgtcatttcaacgcgttactgaaatggttacgtaatggtgaagataaaagaggtagcgatgaatattaaaattaatgagataaaaatgacgccccctacagcatttacccctggccaggttatagaggaacaagaggttatttcgccttcaatgttagctctccaggagttacaggaaacgacgggggcagcgctctatgagacgatggaagaaataggaatggcgctgagtggtaaactgcgcgaaaattataaattcactgatgctgagaaactggagcgcagacagcaggctttgctgcgtttgataaaacaaatacaggaggataatggggcaacgttgcgtccgcttaccgaagagaatagtgatcctgatttacagaatgcgtatcaaattatcgctcttgcaatggcgcttactgccggcgggttgtcaaaaaagaaaaaacgcgatttgcaatcgcaactggatacgcttacagcggaggagggatgggaacttgccgtttttagtttactggaacttggcgaagtggataccgctacgctgtcctctctgaagcgttttatgcaacaggcgatagacaacgatgaaatgcccttatcgcagtggttcagacgcgtggcagactggccggatcgctgtgaacgggtccgtattttgctaagagcagtagcctttgaacttagcatatgcatcgaaccctcggagcaaagtcgtttggccgcagcattagtacgtttgcgtcgtttgctgttattccttggccttgaaaaagagtgccagcgtgaggagtggatttgccagttgccgcctaatacattactgccgctactactcgatattatttgtgagcgctggcttttcagtgattggttgcttgatagacttaccgctatagtttcttcatcgaagatgttcaatcggttactccaacaacttgatgcgcagtttatgctgatacccgataactgttttaacgacgaagatcaacgtgaacaaattctcgaaacgcttcgtgaagtaaagataaatcaggttttattctgatacctggctttcaatatttaggtaaattggctttctggctcatcatgaggcgtcaggatggattgggatctcattactgaacgtaatattcagctttttattcaattagcaggattagctgaacggcctttagcaaccaatatgttctggcggcaaggacaatatgaaacctatctaaactatcataacggtcgtattcacttatgtcagatactcaagcaaaccttcttagacgaagaactgctttttaaagcgttggctaactggaaacccgcagcgttccagggtattcctcaacgattatttttgttgcgcgatgggcttgcaatgagttgttctccacctctttccagctccgccgagctctggttacgattacatcatcgacaaataaaatttctggagtcgcaatgcgttcatggttaggtgagggagtcagggcgcaacagtggctcagtgtatgcgcgggtcggcaggatatggttctggcgacggtgttattaatcgctattgtgatgatgctgttacctttgccgacctggatggttgatatcctgattactatcaaccttatgttttcagtgatcctgctcttaattgctatttatcttagtgaccctctcgatttatcggtatttccgtctttattacttattactacattatatcgtttgtcactcacaatcagcacatcacggctggtactgttacaacataatgccggtaatattgtggatgctttcggtaagtttgtcgtaggaggaaatctcaccgttgggttggtcgtatttaccatcattactatcgtgcaatttattgtcattacaaaaggtatcgagagggtggcggaagttagcgcacgtttctcgcttgatgggatgccaggcaaacaaatgagtatcgatggcgatttgcgtgccggagttatcgatgcagaccatgcccgtacattaagacagcatgtccagcaggaaagccgctttctcggtgcgatggacggtgcgatgaaatttgttaaaggcgatacgattgccggtattattgttgttctggtgaacattatcggcggtatcattatcgctatcgtacaatatgatatgtcgatgagtgaggctgttcacacttatagcgtactgtcaatcggagatggtttatgtgggcaaattccatcgctgctgatttcccttagcgcgggaattattgtcacccgtgtcccgggtgagaaacgccagaacctggcgacagagttgagttctcaaattgccagacaacctcagtcgctcatattaaccgctgtggttttaatgctcctcgctttaattcctggctttccttttatcactctcgctttcttttcagcgttgttagcattgccaattatcctcattcgccgcaaaaagtctgtggtttccgcaaatggcgtcgaagcaccggaaaaagatagtatggttcccggcgcatgtcctctaatcttacgtcttagcccgacgttacattctgccgacctgattcgtgatattgacgccatgagatggtttttatttgaggataccggcgtccctctccctgaggtgaatattgaggttttgcctgaacccaccgaaaaattgacggtactgctatatcaggaacccgtatttagtttatctattcccgctcaggcggattatttattgataggcgcggacgctagtgtggtgggtgacagccagacgttaccgaacgggatggggcagatctgttggcttacaaaagacatggcccataaggcgcaaggttttggactggacgttttcgcgggcagccaacgtatctctgccttattaaaatgtgtcctgcttcggcatatgggagagtttattggtgttcaggaaacgcgttatctaatgaatgcgatggaaaaaaactactctgagctggtgaaagagcttcagcgccagttacccattaataaaatcgctgaaactttgcaacggcttgtatcagagcgggtttctattagagatttacgtcttattttcggcaccttaattgactgggcgccacgtgaaaaagatgtcctgatgttgacagaatatgtccgtatcgcgcttcgtcgtcatattctgcgtcgtcttaatccggaaggaaaaccgctgccgattttgcggatcggcgaaggtattgaaaacctcgtgcgtgaatccattcgccagacggcaatggggacctatactgcgctgtcgtctcgtcataagacgcagatcctgcaacttatcgagcaggcgctgaagcagtcagccaaattattcattgtcacttctgtcgacacccgacgtttcttgcgaaaaattacagaagccaccttgttcgacgtaccgattttgtcatggcaggaattaggagaggagagccttatacaagtggtagaaagtattgaccttagcgaagaggagttggcggacaatgaagaatgaattgatgcaacgtctgaggctgaaatatccgccccccgatggttattgtcgatggggccgaattcaggatgtcagcgcaacgttgttaaatgcgtggttgcctggggtatttatgggcgagttgtgctgtataaagcctggagaagaacttgctgaagtcgtggggattaatggcagcaaagctttgctatctccttttacgagtacaatcgggcttcactgcgggcagcaagtgatggccttaaggcgacgccatcaggttcccgtgggcgaagcgttattagggcgagttattgatggctttggtcgtccccttgatggccgcgaactgcccgacgtctgctggaaagactatgatgcaatgcctcctcccgcaatggttcgacagcctatcactcaaccattaatgacggggattcgcgctattgatagcgttgcgacctgtggcgaagggcaacgagtgggtattttttctgctcctggcgtggggaaaagcacgcttctggcgatgctgtgtaatgcgccagacgcagacagcaatgttctggtgttaattggtgaacgtggacgagaagtccgcgaattcatcgattttacactgtctgaagagacccgaaaacgttgtgtcattgttgtcgcaacctctgacagacccgccttagagcgcgtgagggcgctgtttgtggccaccacgatagcagaattttttcgcgataatggaaagcgagtcgtcttgcttgccgactcactgacgcgttatgccagggccgcacgggaaatcgctctggccgccggagagaccgcggtttctggagaatatccgccaggcgtatttagtgcattgccacgacttttagaacgtacgggaatgggagaaaaaggcagtattaccgcattttatacggtactggtggaaggcgatgatatgaatgagccgttggcggatgaagtccgttcactgcttgatggacatattgtactatcccgacggcttgcagagagggggcattatcctgccattgacgtgttggcaacgctcagccgcgtttttccagtcgttaccagccatgagcatcgtcaactggcggcgatattgcgacggtgcctggcgctttaccaggaggttgaactgttaatacgcattggggaataccagcgaggagttgatacagatactgacaaagccattgatacctatccggatatttgcacatttttgcgacaaagtaaggatgaagtatgcggacccgagctacttatagaaaaattacaccaaatactcaccgagtgatcatggaaactttgctggagataatcgcgcggcgtgaaaagcaattacgcggcaagcttaccgtacttgatcagcagcaacaggcgattattacggaacagcagatttgccagacgcgcgctttagcagtgtctaccagactgaaagaattaatgggctggcaaggtacgttatcttgtcatttattgttggataagaaacaacaaatggccgggttattcactcaggcgcagagctttttgacgcaacggcagcagttagagaatcagtatcagcagcttgtctcccggcgaagcgaattacagaagaattttaatgcgcttatgaaaaagaaagaaaaaattactatggtattaagcgatgcgtattaccaaagttgagggaagtcttgggttgccatgccagtcttatcaggatgataacgaggcggaggcggaacgtatggactttgaacaactcatgcaccaggcattacccattggtgagaataatcctcctgcagcattgaataagaacgtggttttcacgcaacgttatcgtgttagtggcggttatcttgacggtgtagagtgtgaagtatgtgaatcaggggggctaatccagttaagaatcaatgtccctcatcatgaaatttaccgttcgatgaaagcgctaaagcagtggctggagtctcagttgctgcatatggggtatataatttccctggagatattctatgttaagaatagcgaatgaagagcgtccgtgggtggagatacttccaacgcaaggcgctaccattggtgagctgacattgagtatgcaacaatatccagtacagcaagggacattatttaccataaattatcataatgagctgggtagggtgtggattgcagaacaatgctggcagcgctggtgtgaagggctaattggcaccgctaatcgatcggctatcgatcctgaattgctatatggaatagctgaatgggggctggcgccgttattgcaagccagtgatgcaaccctctgtcagaacgagccgccaacatcctgcagtaatctaccacatcagctagcgttgcatattaaatggacagttgaagagcatgagttccatagcattatttttacatggccaacgggttttttgcgcaatatagtcggagagctttctgctgagcgacaacagatttatcctgcccctcctgtggtagtccctgtatattcaggctggtgccagcttacattaatcgaacttgagtctatcgaaatcggcatgggcgttcggattcattgcttcggcgacatcagactcggtttttttgctattcaactacctgggggaatctacgcaagggtgttgctgacagaggataacacgatgaaatttgacgaattagtccaggatatcgaaacgctacttgcgtcagggagcccaatgtcaaagagtgacggaacgtcttcagtcgaacttgagcagataccacaacaggtgctctttgaggtcggacgtgcgagtctggaaattggacaattacgacaacttaaaacgggggacgttttgcctgtaggtggatgttttgcgccagaggtgacgataagagtaaatgaccgtattattgggcaaggtgagttgattgcctgtggcaatgaatttatggtgcgtattacacgttggtatctttgcaaaaatacagcgtaaacctgataagaaaaataatatgcgaacaatataatagcgttccaggtcgtgtcatgagagatacagtatgtctttacccgattcgcctttgcaactgattggtatattgtttctgctttcaatactgcctctcattatcgtcatgggaacttctttccttaaactggcggtggtattttcgattttacgaaatgctctgggtattcaacaagtccccccaaatatcgcactgtatggccttgcgcttgtactttccttattcattatggggccgacgctattagctgtaaaagagcgctggcatccggttcaggtcgctggcgctcctttctggacgtctgagtgggacagtaaagcattagcgccttatcgacagtttttgcaaaaaaactctgaagagaaggaagccaattattttcggaatttgataaaacgaacctggcctgaagacataaaaagaaagataaaacctgattctttgctcatattaattccggcatttacggtgagtcagttaacgcaggcatttcggattggattacttatttatcttccctttctggctattgacctgcttatttcaaatatactgctggctatggggatgatgatggtgtcgccgatgaccatttcattaccgtttaagctgctaatatttttactggcaggcggttgggatctgacactggcgcaattggtacagagcttttcatgaatgattctgaattgacgcaatttgtaacgcaacttttatggatcgtcctttttacgtctatgccggtagtgttggtggcatcggtagttggtgtcatcgtaagccttgttcaggccttgactcaaatacaggaccaaacgctacagttcatgattaaattattggcaattgcaataaccttaatggtcagctacccatggcttagcggtatcctgttgaattatacccggcagataatgttacgaattggagagcatggttgaatggcacaacaggtaaatgagtggcttattgcattggctgtggcttttattcgaccattgagcctttctttattacttcccttattaaaaagtggcagtttaggggccgcacttttacgtaatggcgtgcttatgtcacttacctttccgatattaccaatcatttaccagcagaagattatgatgcatattggtaaagattacagttggttagggttagtcactggagaggtgattattggtttttcaattgggttttgtgcggcggttcccttttgggccgttgatatggcggggtttctgcttgatactttacgtggcgcgacaatgggtacgatattcaattctacaatagaagctgaaacctcactttttggcttgcttttcagccagttcttgtgtgttattttctttataagcggcggcatggagtttatattaaacattctgtatgagtcatatcaatatttaccaccagggcgtactttattatttgaccagcaatttttaaaatatatccaggcagagtggagaacgctttatcaattatgtatcagcttctctcttcctgccataatatgtatggtattagccgatctggctttaggtcttttaaatcggtcggcacaacaattgaatgtgtttttcttctcaatgccgctcaaaagtatattggttctactgacgctcctgatctcattcccttatgctcttcatcactatttggttgaaagcgataaattttatatttatctaaaagactggtttccatctgtatgagcgagaaaacagaacagcctacagaaaagaaattacgtgatggccgtaaggaagggcaggttgtcaaaagtattgaaataacatcattatttcagctgattgcgctttatttgtattttcatttctttactgaaaagatgattttgatactgattgagtcaataactttcacattacaattagtaaataaaccattttcttatgcattaacgcaattgagtcatgctttaatagagtcactgacttctgcactgctgtttctgggcgctggggtaatagttgctactgtgggtagcgtgtttcttcaggtgggggtggttattgccagcaaggccattggttttaaaagcgagcatataaatccggtaagtaattttaagcagatattctctttacatagcgtagtagaattatgtaaatccagcctaaaagttatcatgctatctcttatctttgcctttttcttttattattatgccagtacttttcgggcgctaccgtactgtgggttagcctgtggcgtgcttgtggtttcttctttaataaaatggttatgggtaggggtgatggttttttatatcgtcgttggcatactggactattcttttcaatattataagattagaaaagatctaaaaatgagtaaagatgacgtaaaacaggagcataaagatctggagggcgaccctcaaatgaagacgcggcgtcgggaaatgcagagtgaaatacaaagtgggagtttagctcaatctgttaaacaatctgttgcggtagtgcgtaatccaacgcatattgcggtttgtcttggctatcatcccaccgatatgccaataccacgcgtcctggaaaaaggcagtgatgctcaagctaactatattgttaacatcgctgaacgcaactgcatccccgttgttgaaaatgttgagctggcccgctcattattttttgaagtggaacgcggagataaaattcctgaaacgttatttgaacccgttgcagccttgttacgtatggtgatgaagatagattatgcgcattctaccgaaacaccataaatgcttttggtatgcttcttcaggccactgcgaaggttaagagggtaatagcgtatagagcagtgcttgacgataaaggtgagagactgaaaataatcgcttttagcctggcacaagcaccagatagcgtattataaaattaaacaagataatggattggtgcgtctgaatggactcgaaccatcgacccccaccatgtcaaggtggtgctctaaccaactgagctacagacgcattaaaatgatggtgcgttcaattggactcgaaccaacgacccccaccatgtcaaggtggtgctctaaccaactgagctatgaacgcaacgttgtaggtgacaacggggacgaatattagcgtcacaaccgcaatgaggcaagagggaaatcgcaattttcttcctgaaatcacctgattgcggtggaaatatgcaacatgtcgagaaaatagccgccatgcgacggctatcgtcgtattatcgcgcagcgcgctgcaaaatgatggcggacggctgacgttgtagatagcgcatccgtagcatcattaacaccgccgccgaggtcaggccgatgatgaaccccatccagaagcctgccggtcccatacgatccaccaccaaatccgttaacgccaggatataaccgctgggtaaacctaacacccagtaggcggtaaaggtgataaaaaagatggaacgcgtatctttataaccgcgcagaataccgctgccgataacctgtatagagtcggaaatctggtaaaccgcagcgagcagcattaattgcgcggcaagcgccacgacctcagggttgtcattgtagagcaaagcaatatgcttacgcagagtaacggtaaaaatagcggtaaccacagccatacaaatgccgacgcctaaaccggtacgcgctgcggtttgcgcatccagcgttgagccctggcccagacgataacccactcgaatcgttaccgccgcagccagcgacatcggcagtacgaacatcagcgagctaaagttaagcgcaatctgatgaccggcgacatccacaatacctaatggcgaaaccagcagcgcaacgaccgcaaataacgtcacttcaaagaacagcgccagcgcaatcggcaaccccagttgaatcaggcgcttcatgacgacgctatcgggtttgccaaagcctttttcattacgaatatcacgcattgaacgcgcgtgtttaatgtaagaaagcatggcgataaacatcacccaatagaccgccgcagtcgcaacgccgcagccgataccgccgagttccggcataccaaaatggccatagataaaaatatagttcaccggaatattcaccagcaggcccaaaaatcccatcaccatacccggtttggttttggccagaccttcgcactggtttcgcgctacctgaaagaaaaggtatcctggcgcgccccacagcagcgcgcgaagataacccacggctttatcggccagcgccggatcaatattatgcatagagcggataatgtatccggcattccacaggacgatcatcaccagcacggagacaaagcccgccagccagaacccttgtcgaacctgatgcgcgatacgctcacgacggccggagccattgagttgcgcaatcacaggcgtcaaggccagcagtaagccgtgaccaaacaaaatggcgggaagccagatagaggtgccgatagcgacggcagccatgtccgtagcgctatagcctcccgccatgacggtatcgacgaatcccattgcggtctgtgccacttgcgcaaggatcaccggtattgctaacgctaataactgacgcgcttcactggtatacttctgcacgtattcaccttttattttgttgttatatgaaagactaaaaagccgccgaagtggcagccaaaagaaatagcaggggaaatttcagtctattgtagcggggtattactatttctccagtgaaaaaacagttgttaacggcgcattgctggcaagctgtttttccacctgctattgtgctgaacagttctgcttttatttatttcaggagttgaagatatgtttacggggatcgtacagggtaccgcgaaactggtatcgattgatgaaaaacccaactttcgcacccatgtggtgacgttacctgactacatgctggaggggctggagacgggggcgtcggtagcgcataacggatgctgtttgacggtgactgaaataaacggtaaccagataagttttgatctgatgaaagaaacgttgcgcatcaccaatctgggcgcgttgagggtaggtgatgaggtcaacgtagagcgcgccgccaaattcagcgatgaaatcggtggtcatctgatgtcggggcatattattacgacggcggagatcgcgaaaatcctgacctccgaaaataaccatcaggtgtggtttaaagtgcaggatgcgtccctgatgaagtatatcctgtacaaaggctttatcggcgtcgacggcatcagtttgaccgtcggcgaggtaacgccaacgcgcttctgcgtgcatctcattccggaaacgttggaacgtactacgcttggcagaaaaaaactgggtgagcgtgtgaatatcgagatcgatccgcaaacgcaggcggttgtcgataccgtagaacgcgtactggctgcgcgagaaaatgcggtcagaaatcaggccgacattggctaacggaaaataagattcccccgcatgaaatgcgggggagatgattagcgaggaacgcgcagtccgttttcaacgccgcgcgtaaataccacctgccaaagctggatatcacgcgcgcgaaacgcacccgcgcaggcgttgagataatagctgaacatacgtttaaagcgctcgttataattgcccgcaatctctggccaggcattgataaagcgctcatgccacgccatcagagtcgtgtcatagtcggcgccaaagttatgccagtcttccattacaaagtgtgattcgctggcctcggcgatttgacgaacagacggcaaacaaccgttggggaaaatatacttattgatccacggatcgacattatgatcggtttttttagaaccaatagtatggagcaggaaaagaccatccggttttaaattcctgtcaacgacctcaaaataggtgttgtagttttttggcccgacatgttcgaacatgccgacagagacgattcggtcaaactgatcgttaaggtcgcgataatcttcgaggagaatggagacatccagaccttcgcaacgcgtctgcgccattttttgttgttcagcggagatcgttacgcccaccacgctaacgccataatgggtcgccatatattgcgacaggccgccccagccgcagccgatatccagcacacgcatccccggttgtagctgtagcttttcgcaaattaatttcagcttggcttgctgtgccgcttccagcgtatcggcatctttccagtaggcgcaagaatattgcatatagggatcgagcatacgggaaaaaaggtcattaccaagatcgtaatgttccttgccgacaatccaggcgcgttttttactttgtagattaatcagacgcgcgccgaggatacggagcgtatctttaacatggtgggggagttgattttcaagaccggcacgtaagactttgctgaagaaaatatccagacgctcgcattcccaccagccatccatgtaactctcacctaaccccaacgatccttcctgaaggacgcgtttaaaaaaatcgggattcttaacacgaatgtcagacggggcggaaccattaattgtaatatccgcgcgacttaacaattcgttggcgattcggtaccagttatcatccggtacgctgacttcttctatacacgatgaactcatagtttctccatcactggacggtgatcagaaccttaaaacagcgtagacgcttttttggctttgtgagaaatcccacggacaattccgtgagccagttatccgacgtagaacagaggaagggaggagcccttgccgaaaaggccatccatggtgaatcgggaacgctccggttcccgttaatgcctaataattatcgtaatataaacaaccgggaatcagtataggccgcaatttttgatgattcaaccgaaaattgttagcgtgctaattaccagcggttaacaagtctttagtgagacttgtcgtgggcgacattggcatggggaaatccggtctcagcgcaatctgcatgagactgcattttgtaacctaacgccgccagaacaacggtagagagcattacgctggtggtggtcagcagcggcgtgctgatgagccatgaaaccaccaggcttgccaggaaacataaccccagttgcagcgtattttgtagcgccgcagcgcgccccgtggcttgagggaaagggcgtaacgcttgcgcgacgacgatagggtagatggcaccattagcaatcgccattacgcagaaaggaatcaggatctccaccagtgaggcattattcagaaggcccgctccccaggtggcgataacgctcagcgcatacagccctaacagccacggaagcaattggtagccctgccatttttgtagcgccgcgcggcaaccatatccgccaatcagaaaagcgatggtttgcggaacatagctcaggccaatcactgccgggctgtaacccatcgcgctgagaataaatggggaccctgttagccacgcaaaaaagctggcggaacaggcggcataaatcagcacattaccgcgataggttttagagcgtaacaacgtcgcgaaagtgagtttatcctgtccttcggtacgcgcttttcccgatggttttaagcgcagcgctggcaacatcagcaacaacgtaatcacgaacagggtggcgaaaatcgcctgccatgagaaatgcgtcagtatccagcttcccagtaagggcgcaagcgccggggataagcccaccagtggcatgatcgtggcgaagatacggttaattttttgcgaaggataataatcggtcaccagcgcttgccagattaccgttgccgcgcaaacgccgacggcctgcacgaagcgcagcgtcagcagtgctgccgcgctttctacccacagcatccccagacttccgagcgcaaagatagataaccccagcagtaaaatcggtttacggccataacgatccgatagcggtccccaaagtagttgcgcgacggcaaagccagctaaaaacaggctgaggctggcgctgaccgcggcggcaggcgtttgtaaatccgcctgtatggcggcaaacgcgggtaggtacatgtccgtagccagaaatcccagcacgctaaggccggctaaccagactaaaaaaccttttccaggttgcatatttgtttctctttcttatcagacagacattgtcgcagagtgtagggagtgaaattacggttgtgaaacgttaatatttgtccagtgaattcaaaatttttgtaggcaaattatgtggtcggaatactcgcttgaagtggttgacgccgtggcgcgcaatggcagttttagcgcggcggcgcaggaactgcaccgtgtgccttcagcagtcagttacaccgttcgtcagttagaggagtggctggccgtaccgctttttgtacgacgtcaccgtgatgttgaactgacgcctgctggcgtctggtttttaaaagaagggcgttctgttatcaaaaaaatgcagatcactcgccagcagtgtcagcaaattgctaatggctggcgcgggcagttagctattgcggtggacaatatcgtcagaccagaacgtacccggcagatgatcgtcgatttctatcgccattttgacgatgtggaactgctggtttttcaggaggtgtttaacggcgtctgggacgcgctctccgacgggcgtgtcgaactggcgattggggcgacgcaggcgattccggtaggggggcgttacgcttttcgggatatggggaccctgagctggagctgcgtagtggcaagcgatcacccgctggcgtcgatgcctgggccgttaagcgatgataccctgcgcaactggccgtcgctggtcagggaagacacttcgcgaaccttaccgaaacggattacctggctgctggataaccaaaaaagggtcgtcgtaccggactgggagtcatcggcaacctgcctgtcggcaggactatgcgtgggaatggtgccgacgcattttgcccgacagtggatagacagcggaaaatgggtggcgctgacgttagagaatccgtttcccgatgcggcctgttgcgtgacgtggcagcaaaacgaggcctcgcccgcgctggcatggctgctggactatttgggcgatagcgaaacgttgaatcgggagtggctgcgggagccagaagaggctcccgacagcggggattaacgccgatagtcgcggaacgggccgtcagcgaccgagcgacgctcaaccaggcgtggatgaacttcaatagactgtgactcttcacgcttattgacgatgcgatccaatagcatattaaatgcggtttcgcctaaagagtctttgggctggtgaatcgtcgtcagcgccggggtaaagtaacgggcgttacgcacattgtcataaccgatcaccgaaacgtcctgcggtacgcgaagccccatttcgtcagccgcgcaaagcgcgcccatcgccataatatcgccgccgcagaaaacggcggtagggcgatgtgactgcgataaaatttgctgcatcgcgtggtaaccggattccggctcgaagtcgccctgaacaatccagttgtccggcacgttgatcagcgcctcctccatggctttcataaagcctgccagccggcccgcgccggtgttgcgctccagcgggccgggaataacgccgatatcccggtggccgcgctcaaccagataacgacccgccatatagccgcctgcaaaggcgttatcaatcaccgtgtcggtaaaatcggccttcgcctcgccccagtccatcaccaccatcggaatatggcgatactcttccagcatggaaagcagaggttctggatactcagaacacatcaccagcaggccatccacgcgcttttgcgccatcatggacaggtaggcgcgctgtttttccaggttattccaggcgttgcctaaaatcagcgtatagcctttctggaaacagtttttttcaaccgcctcgataatttcggcaaaataggccgcttcgctgctggtcgccagtaagcctatcgacttggtatggttaaccttcaggctacgcgcgacggcgctgggagagtagtgcagctctttaattgccgcccagaccgcgttacgcgtttcttcagcgacaaaacgcgttttgttgattacgtgtgatacagttgtagtggaaacgtttgcccgtttcgctacatctttaattgttgccattacatttcactccagaccctcgctaagctcctgagaaacgccaggtaaacgtttgcctacacacaccctaatcgcaacatcagggttgcggcacgccggaaaaacgacacggaacgtcaggaaggggtcaatggccgttacgctaattcagtaagcctggaattttgtctgatcttgaggaaaaggggaagcgttaaaaacagttatcaatataaaacatgagagatttttgtgcgggaatgtgcaaaaatgcgctatatcactttttgtgtgggaataaaaaggagaaaacttgatgagtaccgacctgaaattttcgttgattactacgctgattgttctgggcgtgattgtcgcaggtggattaacggccgctctgcactgatttcctctcttctgagggtgggcgtctcctctattctatccctctctaaaacgcagaaggcgtaccttctgcgtactcagacttatgcggcgagatttttcgcaacaaattcccagttaaccagcgcccagaaatgctccagatagtttggacgggcgttgcggtagtcgatgtaatacgcgtgttcccacacatcaaccgtcagcaacggcgttgcatccgtagtcagcggcgtaccggcatttgaggtagaaacgatagccagtttgccatcagcgctttttaccagccatgtccatccggaaccaaagtttttgatagcggcatcggtgaattgcgctttaaattccgcgaagctgccaaaagatgccgcgatagcatcagccagtttcccggtcggttcgccgccagcgtttggcgccaggcagttccagtagaaggtgtggttccacacctgagcggcgttattaaagatgccgccttcggaagtgcgcacgatctcttccagcgatttgccttcaaacgccgtgcctttgatcaaattgttaagattggtcacgtaagtctgatgatgtttgccatagtgatattccagcgtctcagcagaaatatgcggcaccagagcatctttggcatacggtaatgcaggtaattcgaacgacattgcttctctccttattattaatattgcgcacgcacaatacccctggtgcgcgtaaggatagggtagcaaattgagcggtggcgcaaaagaagaagttatcctgtcgttaaacgacaggataaaatattagcgaattgttttaggcgtcatcacccggcgggcgccgacataatgacgttgccagtattcttcgttcagtgaggtgatcttaatttcctgaccgctgcgcggagactggataaacttaccgttgccgacatagacgccaacgtgatcggcggtgccgcgcccctgcgtacggaagaacaccagatcgccgtttttcaactcgctacgctcaatgggcgccgcgtcacgcaggtgatacatctcattcgccgttcgggggatacggatcttcactaaatctttataggcataataaaccagaccgctgcaatcaaaaccggtgcgcggcgacgcgcctccccagtgatacggtttaccaatctgattcatgagtttggacatcgcggttttcgtcgctttttgtacttttgcacgatgcgcatcggcaatagagaccggcaatgttcctttccccttcacgcagtgcggcttacggcctttacgcgtcgtgcatttttccgttacgtcgagggcggcgattgacgtgggcgcggttctgttacgacgatgcgtcgtatgacgagatttcgtggaggcggtggtacgttttggcgtagaagcggaagaagaacggctggtttttgaggttttttttacgttttttttgctggttttactgatctttttcgttgtgcttttctttttatctgccgttttcgtgacatgagaaacagcaggcgtcgctttggcttgcctggaagcatgggccattggcgtaaaggggagagtagtaaaaagtaaagcacagagcgtgatcgagattttgtttatccgcgccactgagcaatcctctgttaaaggcaggcgattcatgcctgcgtatgatttacaaaacctgataattctaatctacaaaagcacagattggtaattgcttttggtttctgaagctgtgtttcgttaacagatgtaaaaaaatagcaattaatgctaaacacgaacgcgttatctacaaatcactgcgcggcaacccgcttaaaagatattttgtatacaacttattcccgcagacggtaaaataataaggcatgatgaaaatgttattttccgttgccagcctgacccgttacaatgacaggcttcagtcgtaaaagtagtttaaggaagcgagacaatgagcaccactatcgaaaaaattcagcgccagatcgctgaaaacccgattctcctgtatatgaaaggttcaccgaaactgccaagctgtggtttctctgcgcaggccgttcaggcgctttcagcctgcggggaacgttttgcctatgttgatatcctgcaaaacccggatattcgcgctgaattaccgaaatacgccaactggccgacattcccacaactgtgggtggacggcgagctggtcggcgggtgtgatattgtgattgaaatgtatcagcgtggtgagttgcagcagcttattaaagaaactgcggcaaaatataaaactcaggagccggacgcagagtaatctgtgcaaggagaaagcgacctgtaaaggtcgcttttttaccgccatcgtgagcaagagcggcgttgttagcctcgttatttgtccgtcggcaaaggtaacggccagccgcccaggcgcttccagcgattgacaatttcacaaaacagcaccgctgtccgctcggtatcatacaaagcggagtgggccttttcaccgtcaaactccatacctgccgccaggcacgcttttgataacaccgtttgtcccagcgccagtccgctcaatgccgcagtatcaaaggtgacgaacggatgaaacgggttacgtttcagcgaggcgcgctctgcggcggccatcataaaactgtgatcaaaagtggcgttatgcgcgaccataatggcgcggctacaaccgctgtctttgatacctttacgcaccattttgaaaatagcgtgtagcgcctcatattcactcaccgcgccgcgtagcgggttagagggatcgataccgttaaacgcaagcgcttccggctgtaagttggctccagcgaacggctccacatggaaatgcagcgtcatgtccggcatcagccagccttgttcatccattttcagcgtgatggcggcgatttcgagcagcgcatcggttttagcgttaaatcctgcagtttcaacgtcgatgacgacaggataaaaaccacgaaaacggtcgcacagaccggaaagttgagcgttatcggacatctgagtctcttaatacgaaaaaatgcagcgcgtattatggcaaattttacgccgggatgcagtaaaacaacgggcgcagtgacctgcgcccggcgggggatcagttacccagaccgcggcctgcgtctttagcttcaatcaattcgattttatagccatccggatcttcaacgaaggcgatgatggtcgaaccgccttttaccggccccgcttcacgggtcacgttgccgccgttctgacgaatgcgttcacaggcttcagcagcattgtcaacgctcagcgcgatatgcccgtacgcattgcccatgtcgtagctctcaacgccccagttataggttagttcgatgaccgcttcttccgtttccggaccatatcccacaaaggccagcgagtatttgtattccggattctcactggtacgcagcaatttcatgcccagaacgttagtgtaaaaagcgatggaacgctgcaaatcgccgacgcgcagcatagtatgcaataaacgcattttcgttgtccttaaaatagtcaagatattcaaagtatagcggcgatgtgaggccgctatcaatgaaattacagagtagggtagtcagtgtagccttccgcgccgccgccataaaaactttcgggacgctgtggattaagttccgctttacgttgcagacgcgctaccagatccgggttagcgatgtaatcacgaccaaacgccacggcgtcaatcagccctttttcgatcagatcttccgctttttctggcgtataggcgccagcgccgatgatgggaccgtggaaacgcgcgcgcactttttcacggaacgcgtcgctgtacggttcgccgcccgcccagtctggttcagacatatgcagataagcgatgccgcgtttgcctaacgcttcaatcagataaagggcgtcagcttcttcattcgggccgttatcgacattctggaaagtgccgacaggagaaaggcggatgccgatacggtccgcgccccattccttaatgccggcatcaaccacctccagtaccagacgggcgcgattctctacgccgccgccgtaccgatcggtacggtgattagaagacggtgagaggaactggtgcagcagataaccgtgcgcggaatgcagctccaccagatcgaagcccgcctctcgggcattggcgatagcctggcggaaatcgttgacgatcccggggatctcgtgagtatccagcgcgcgcggcgtggaagtctctacgcggatggcctggccgttttcgtcacgcaaagaggtgcgggttcccgcattgatagcggatggcgcgacgggcgcttgtccgcctggttgcaggctggcgtgtgaaatacggcccgtatgccacagttgcaccgccatatggccgccctgggcatggactccctgagtgatttttttccaggcggcgatctgctcatcgctgtgtaatcccggtgcgccggcatagcctttcgcctgtgcggagatttgtgtggcttcgctgatgatcaatccagcgctggcgcgttgacggtaatattccgccattaacggcgtaggaatgtcgcccggttcaatactccgcaaacgcgtcaaaggcgccataaatacgcgatttgtcgccgtgatggcacccaccttgaggggggtaaacagttttgctgatgacatagtggctcctgatataagtagaccggtcgtcttgtaataaaggaaataaaaacgcctgttactgctcaggcgttgcaatgatggtcttaacatgcgccaacgcattttccagcggcgcggcgctacgggatattttggcctgcaaattggcgcccagccacagggcataaagtacctgcgcctgtggcaacggctggccggtgaaatgtaaacagtggctattacggccatcttccagcgcgcgtgcaagcagtgccatgatctcctgcgcccctttatccatcgtagagcgcatatcctccgacagatcgcagacttccgctgacagtttcaccgtcaggcaaccgctgatggcgccttgctggcaaaactgctttaacgtttcctgataccaggcgagaagacgatcgcgatgattaccgggaccgcaggtgaagtgcgccgtaagacgctgatgatagcaggcgtaatgtcgctcaagcatggcgacgccgaaggcttctttcgagcgaaagtagtgataaaacgaccctttaggcacttgggcggttttgagcaactcgctaagccccatgccggtaaaaccccgttgcatacaaagctgctcgccggtggccagcagatgttcgcgggtatcgtgttcggtttgcttattcatagcaggcagtatagtagaccagtcggtctactacaagcagagttgccataatgtcagttagcgtcttcaatagtcataagcgtcaaacgttgaggaggggatgtggccgagcagttggagttttttcctgtagcaagcccatgtcgcggtatctgccagtctgatgagcgtggcttttgtcggggctgtatgcgcagccgcgacgaacggtttaactggcaaaaaatgagcgatgtcgagaaacaaaatgtactgcggctttgtcgccagcgtttcttgcgtaaaatacgcgcaaataagcctctcccatcggaagatcctcaacaaccttcactcttttaaacgcggaattgcgtatactcaacctcattattctctatgaggaatctgttatggttcagcgtgtcaccatcgctccacaaggcccggagttttcgcgttttgtcatgggttactggcgtttgatggactggaatatgtccgcgcgtcagttagtgagttttatcgaagaacatctggatttgggcgtcactaccgttgaccatgcggacatttatggcggttatcagtgcgaagcggcgtttggcgaggcgctaacgctggcgccgcatttgcgggaaaaactgcaaatcgttaccaaatgcggtattgcgaccactgccagagcggaaaataagctcggtcattatattaccgatcgccgccatattattctgagcgccgaacagtcattaaaaaatctggcgacagattatctggatatgttgttaattcaccgtcccgatccgttaatggatgcggatgacgtcgccgaggcgtttcaacatctgcaccaaagcggcaaagtgcgccattttggcgtttctaattttacgccagcgcaatttacgttgctgcaatcgcgcctgcctttcaccctggcgaccaaccaggtggagatctcgccggttcaccagcctttgttgctggacggcacattagatcaattacagcaactgcgtattcgtccgatggcctggtcatgtcttggcggcggtcggctgtttaatgatgaggcttatcagccgttgcgccaggaactttccgttatcgcgcaagaactcaacgccagttctattgaacaggtggtctatgcctggattttacgtttgccgtcgcagccgctgccgattattggctcgggtaaaatcgaacgcgtacgcgccgcactagaagcggaaacgctgtcattgacgcgtcaacagtggttccgaatccgcaaggcggcactgggttatgacgtgccgtaatcgccaactcgttgactttccgtacatgttttcgccagtggtttacacttaacaggcgaccacatgtaacggaggttttatgaagcgattaagtttagcgatggtgacgctgctggcctgtgcgggtgcgcaggccgccagcgagaaagtagagatgaatctggtgacggcgcaaggcgtaggacagtctatcggcaccgtcgtcatcgatgaaaccgaaggcggcttaaaatttaccccacaccttaaagcgttgccgccgggcgagcatggttttcacattcatgccaacggtagctgccagcccgcgattaaagacggcaaagcggttgccgcagaagccgctggtggtcatctggacccacaaaataccggcaagcatgaaggaccggaaggccaggggcatctgggcgacctcccggtgttagtcgttaataatgatggtatcgccagcgaaccggttactgcgccgcgtctgaagtctcttgatgaagtgaaagataaagcgctcatgatccatgtgggcggcgataacatgtccgatcagccgaaaccgctcggcggcggcggaatgcgttacgcctgcggcgtcattaaataacccggagccagtgttccctgcgctggagcctgttccagctgcgacagcgaacagtgtaaacgccagataatcgccgccagctcatgcgcggcgggttgatgatgatgtgcgagcgtgtcgcagatacgctgtagttcctgtagcgtgacggcaagcgggcgttgctgcacgccgcgctcgctcatcacatcgcgcagcagggatatacaaatatcccgcacccgggaaagcggatcggaacgcgactcccaggcgcgcagctgccacaccacatgcgagcagttcagcagcaccactccccaacgtaataaccaccggcgcgccagcgcatcctgactattgctgagctgactgacgtgatgataggtcagcgattcaaactcgctttcgttatgggaagggtgacggctaagctgatcgacgaaatcccggcgtagcgcgcggatatggcggcggctttttacggcatcggaaccggggcgcaaaatcgcaaacgccagccaggaaatcgcgacgccgacgatcttggcggtattatcgttaaggaagtcggcgaagtcgtacaccggtggattggtcacggcgatgaatgagcccataaaaacgataagctgcccccacagtcccgccagcttaggcatctgcagtttaagcagttgcatcgtgacgaacagcggaaaaaggaaaagcaagaattgccacagatcggtgatttgcaccatcaggccaaatttcaccacgaagctgaataaggacagcagcactaaagtacgcatcaataaggaaagcgacttaaacggcgtggcgacgatggagtagaggacgcaactgatcgccgccagggttaatgcgccgggcccggattcccattgcgcgccaatactccaggcgccaatcaccgtgagcgtgcaaaaggtacgcacgccgctccagatggcctctgcgttatccgtatgccgcgcaaggccgggagtgcggcggatatggatttgatccaccggcgcgccgctttcgatcagatataactgacggctgctgcgcagatatagctggcaaaaatagcgtaatcgctgccagaacgcgaggtgacgataatcctgttcatcctgcgggcgtagcggcgcaataatctgcgccacggtgtagctgtccgcgcgcggttttgccaactcagctaagagttgctcaatgacttcgcggctgttttccggcggcgtcggccagtttaaaagcattctacgcagactggagatcacgctggttaaccgtaattgctggtgtaacaatgcatttagcaatgcattctggcggcgaaaacggtagtgactccagaaggcctgaatacgcagcaggttcatggtcaggatttgcccaatgaccccctcatgcgcggagcggatagcgtcagtagtctccggctgccacagtagactggcatgttccagcaagcgcgcatgcatgtttttaaacgcggtgagcagggcggtaccatccgatgtgctgggtaggatcatcatcatcatgccgccacagaggatgccgacgataacttcacatacacgtgcctgggcgatatcccacaactgcgtgatttctacaatattaaccatcgggaacgcgatgatcgccgccgtgtagccggacaactggaaagcataagcggcattattggtaaaatgcgcgcaggcccaggtacaaaaaccgatccaggcggccatgctaaataagaacaaccagggttcattcagcgtatggccagcaataattaacgcggcggtcgcgccgagtaaactcccggcaatacgccccagacttttactgattacgccgcctacggtcggaaagctcaccactgcggccgaagtcattgcccagtagggctcatccagattgagataataagcgaatgtcagcgcgagacacatggcaatggtattgcgcaacgcgtaacgccactggccggaggtcgctttaaaccagggcgtatttcgcagggccggcagggagagtttcattaccgctgtccaatggctacgctgcaggtagtgccggagacgagcgtgatatcctgcggtaaagcgtcaaattcgatacgtaccggtacgcgttgcgccagacgtacccacggtacgttgggtttgatatcgggcactaaaccggagtcactttccacgctttggtcgtaaatagcgcgcccgatactgccaacgtgaccctgtaacttaacattgccactatacagtgttattaatgcaggctcaccttcgcggatatggcgtagtttggtttcttcgaaatatcccattacataaaatgaatggctatctaccagggcgaaaagtggcttaccggtgctggcataatcaccggtacgcgtggaaaggttggtcacccagccggataccggcgcttttacttccgtctggctaagctgccactgcgcctgttttaacgttgccagtgcgacatctacgttggcctgcatcgctttaacattcagattggcgctatccagatcttcagcagagatgtagttacgcgataaatgtcgacgtcgatcggcttcattattcgcttttgccagatcggactgcgctttggccaactgcgcctgcgcgttaagttctgcaatatggaagggcgttttatcaatgacaaagagaacgtccccggcgttgacgaactgattatctttgatattgagttgggtaatgctgccagaaacctgtggcgttacgctgacctgttccgcgcggattttaccatcgcgcgtccacggtgactgcatatagtaattccataaccaccacgcggccagaacggcgacgacggcgacaatgagagtagaaaaatattttattgtttttaacgacatatttaccacgcgatcagtaaaacgaggcccagacatacgcaaagcgtaaagagggagagatccattaacaggggatgccagatttcatcagagtatatccggtcacgcaggagtcggtgaataaacaaccagataacgaacccaagcgcaaaggctttaaagaatggcggaaagtaaacagatgctcccaacatgagatcttgtaagggcaatcctgtggcgttgagtatacacttcacaagcaatgttcctttgcgtcagacatcgatgctttagttttagccaaaactgaagctacaggtgccaagtgcgcactatgtctgaaaaaatgtctattggtaagcaaatttagcaatacatttgttttgagaatacaaatactgcacactattctaaaatcagcataataacttagcaagctaattataaggagatgaaattggaatcgccactaggttctgatctggcacggttggtgcgcatttggcgtgctctgattgaccatcgcctcaagcctctggaattgacgcagacacattgggtcacgttgcacaatattcatcaattgccgcctgaccagtcgcagattcaattggctaaagcgataggcattgagcagccatcgctggtacgcacgttggatcaacttgaagataaggggctaatttcgcggcaaacctgcgccagcgatcgtcgcgctaagcggattaaactgaccgaaaaagcggagccgctgatcgctgagatggaagaggtcattcataaaacgcgcggtgaaattttggctgggatttcttcagaggagattgagcttctgattaaacttatcgccaaacttgaacacaatattatggaattgcactctcacgattgaggtgcaggggcatacgtgtggccatgtgaccacacgtaaagcctggtttagcgtggagagacggtaacctggctgccgttgctggccagcacgacacgctgacctgccgagaaacgcgtatttccttgtttctgcacaaccataatggtgttgccatcgtctttacgaatttccagttccacaccctgggttttattcattgcgctctggacgccctggcccgctacgccgccagccaccgcgcctgccgcggtcgccagtgaacgacccgtaccgccgccgatagtgttgccgaggaatccgcccaacaccgcgccgccgatagcgccaatcacgttagaatcatcaccgccctgaatttgaaccggacgaacgttaacgatagtaccgtacgttacattctgaacttgtttagcctcggatgcggtataaacatcacccgaaaggctatcattgttaacacaccccgctagggataaccccatcagtgaaacggccagtacacgtttaatcatttacccatctcctgttcttcacgaaacgctatttcagcatccctatagctaaattatatggcatttatgcagttaaggtcatatcttctgccgaaagaatgtgaaaatcataatcagaagttaattaaccaatcttaaacgaagtcggaagcaagaaaagataggtcattgatatccgtggacgacacggcaaaaaatgtgacgtgggcatagcattacaaaatacgttatgccgagtgttaaggcttaacccagcttaaaaggaagaggtatgaaatcgggccgttttattggcgttatgtccggaaccagccttgatggcgtggatgttgtactggcggcaattgatgaaaccatggttgcgcaacaggcaagtctcacctggcccattcccgttcatctgaaaaaaggcattctcgatatttgccagggacagccgcttacgctctcgcaactcggccagcttgatacccagttaggccggctttttgcacaggcggttaatgcgctgttagcgcaacaacgtttgcagccgcgggatatcgtcgccattggttgtcatgggcaaacggtctggcatgaaccgaccggcgaggccccgcatacgctgcaaattggcgataataatcacatcgtcgcccatacggggattacagtggtcggcgattttcggcggcgggatattgcgctgggcggacaaggcgcgccgttggtgcctgctttccatcacgcgctgttgggacatccgacggaaaaacgtatggtcctgaatatcggcggcatcgccaatttatctctgcttttccccggacaggcggtgcgcgggtacgacacggggccgggtaatatgttgatggatgcgtggatttggcgacaatgcgcgcagccctacgacaaagacgcggcatgggcgaaagaaggtcaggttattcttccattgctgcaaaagatgttgcgcgatccgtactttgctgcgtcggcgcccaaaagtacaggacgcgaatatttcaactatggctggttagagcgccatcttgcggctttccctggcgcagacgcgcgcgatgtacaggccacgctggcggagctgacggcggtctccatcgcccaacaggtgctgctcaacggcggctgcgagcggctgatggtctgtggcggcggtggccggaatccgttagtgatggcccgtctggcggcgctgttgccaggtatcgaggtttcgaccaccgataaggcggggatcagcggcgatgatatggaagcgctggcctttgcctggcttgcctggcgaacgctcgcgggcctgccgggaaatttaccttccgtgacgggggctacagaagccagtgttttaggcgctatttacccggctaacccaataactcagagttaactgaatttttcccggaccctatatcggtaaactagcaaggtcaggaaggggcgtttgcccttccagaagcaggagagctttcgggatatgcctatgaaaaagatcgcaataatgtgtttacctgtgctgctgaccggctgtagcgtttatcaacaatttgttgaacgtatgcaaacggatacgctggaataccagtgtgatgagaagccgcttaccgttaaagtcaataacccgcgtgaagaggtcagttttgtttatgacaataagctgctgaccctgaagcaaggaatctcggcctcgggcgcgcgttataccgacgggatttatgttttctggtcgcaaggcgagagcgccacggtctataaacgagacagaattgtgcttaataactgtcagttacaaaatccgaagcgttgagattttcagtatgggggcgcacaatagcgccacccactgattatttctgatcaacgccatgtctgataacgaccaattgcagcagatcgcgcatctgcgccgtgaatacacgaaaggcggcttgcgtcgccgcgatttacccgctgaaccgttaaccttatttgagcgctggcttgggcaagcgtgcgacgccagactggccgatccaacggcaatggtcgtggcgaccgtagatgacaagggtcaaccgtaccagcgtattgtgttgctcaagcattatgatgaaaaaggcctggtcttttataccaacctgggaagccgcaaggcgcatcagattgagcacaatccgcgtatcagcctgttatttccctggcatatgcttgaacgccaggtgatggtgacaggcaaagccgagcgtctctccactcttgaggtggtgaggtatttccacagccgtccgcgcgacagccagatcggcgcatgggtctctaaacaatccagccgcatttccgcgcgcggtatcctcgaaagcaaattcctggagctcaagcagaagtttcaacagggcgaagtgccgttacccagcttttggggtggttttcgcgtgagtatcgaacagatggagttctggcagggcggcgaacatcgtctgcacgatcgctttttataccaacgcgacgacggcgcgtggaaaatcgaccgtcttgcgccctaaagatgcaaaaatcttgttttaagcactggtgcggatgaatccgccgttttatgctatgtctctttcgcgtctggcgaaaagtcgtgtaccggcaaaggtgcagtcgttttatacatggagattttgatggcaagcagtaacttgattaaacaattgcaagagcgggggctggtagcccaggtgacggacgaagacgcgttggcagagcgactggcgcaaggcccgatcgcgctctattgcggcttcgatcctaccgctgacagcttgcatttggggcatctggttccattgttatgcctgaaacgcttccagcaggcagggcacaaacctgttgcgctggtaggcggcgcgaccggtctgattggcgacccgagcttcaaagccgccgagcgtaaactgaacactgaagagaccgttcaggagtgggtggcgaaaattcgtaaacaggttgccccattcctggactttgattgcggcgaaaactccgccatcgcggccaataactatgactggttcggcagcatgaatgtgctgactttcctgcgcgatatcggtaaacatttttccgttaatcagatgatcaacaaagaagcggtgaagcagcgtctgaaccgtgacgatcagggtatctctttcacggagttctcttataacctgctacaggggtacgacttcgcttgcctgaataaactgcacggcgttgccttacagattggcggttctgaccagtgggggaacatcacttccggtatcgacctgacccgtcgtctgcaccagaatcaggtatttggtttgaccgttccactcatcaccaaagctgacggcacgaaattcggtaaaaccgaaggcggcgctgtctggctggatccgaagaaaaccagtccgtacaaattctaccagttctggattaacaccgcagatgccgatgtttatcgcttcctgaaattcttcacttttatggacattgaagagatcaatgccctggaagaagaagataaaaacagcggtaaagcgccgcgcgcgcagtatgtgctggccgagcaggtgacgcgcctcgttcatggtgaagagggactggtcgcggcgaaacggatcaccgaatgcctgttcagcggttcactgagcgcgctgagcgaagctgactttgagcagttggcgcaggacggcgtaccgatggttgaaatggaaaaaggcgccgacctgatgcaggcgctggtagacgccgaactccagccgtcacgtggtcaggcgcgtaagactatcgcctccaacgctgtcactatcaatggtgaaaaacaatccgatcctgaatacatctttaacgatgaggaccgtctgtttggccgctataccttattacgtcgcggcaaaaagaactattgtctgatttgctggaaataaggcattaagtaacagggagtgagaaatcactcccttatttttgatgttcaggtaaaaaaatgaagaatatcctcgctatccagtcccatgttgttttcggacatgcgggcaacagcgccgccgaatttcccatgcgccgtcttggcgcgaatgtttggccgctgaataccgttcagttttctaaccacacgcaatatggtaaatggaccggctgtgtcatgccgcccagccatctgactgagattgtccaggggattgcggacattggccagttagcgcactgcgacgccgtacttagcggttacctgggatctgccgagcagggagaacacattctcggtattgtgcgccaggttaaagcagcaaatccgcaggcaaaatatttctgcgatcccgtgatggggcatccggaaaagggttgtatcgtggcgcctggcgtcgcagagttccatgtgcgttatgcgctacccgccagcgatattatcgcgcctaacctgattgaactggaaattctcagcaaacatagcgtgaataatgtggatgacgccgtgcaggcggcgcgtgaactgattgctcaggggccagaaattgtactggtaaaacatctcgcccgcgccggttacagttcagaacgctttgaaatgctgctggtgacagcgcaggaagcctggcatattagccgtccgctggtggatttcggttcacgtcagccggttggcgttggcgatgtcaccagtggtttattgctggtcaaacttttgcagggcgcgacgttgcagcaggcgctggagcacgttacggcggcagtctatgagattatgatcgccaccaaaacgatgcaggagtacgaactgcaggtcgtggcggcccaggacaggatcgctaaccctgaacattacttcagcgcaacgcggctgtaattattgctgctaaaaagaggccggatggcggtacagcgagctatccggcaacatgacattaattcagtccttccgctttaagcgctgccgcaacggtcggtctttttgcgacacgctgcatataactttcaatatgcgttaacccgtccatattcagttttacgccataggcccaacgcaatacggtaaacagataagcgtctgcaatggtaaaacgctggccgcaaatccactggtcgtctgaaagcgactcatccacatactgcaatttcttttccagaccggcgcgaacggcgggtttgagtgtttccggcgtgtcagggcggaacagcggggtaaagcctttatgcagttccgttgcaatatagttgagccattccagcgtatgatagcgagcaagactacttaccggcgccagaagctggcggtcgggaacgctgtcggcgaggtactgcataatggcgacgccttcagtcaacagtgtgccgtcatccagcagcagagccggaacctgtcctttagggttgactgccaggtaatcatcaccgttttccaggcgtttttttgcgagatcgacgccatcaagcgtaaagtctttgccaatttcgcgcagggtaatatgggaagcaagagagcaggcacccggtttgtagaacagtttcatcggtaactcctttttgctgaggtttaaagtatggtagtgcggggacgagcaaaaaaaaagccgctaacgcacagttagcggcctgaatgttgtttcccggaaaattaaactgtagcggctttagagcctttttcagcggtatcatcgtcctgggtcatacggttcagcttaggcgctgtcagcagcatcaggacggcgataacggcggttgctatgccaatctgcataaatacgcgaccatagacttccagggacatcagtgggtcagtcacgtcgctcggcacagccatcaggttggcgacataaccgccgatgatgttagcgcctgccgttgtcaggaaccagctacccatgatgaaacccatcagacgctgcggaaccaactgtgcgaccattgccagtcccagaccggagatcatcagctcaccgatactttgcaggccgtagcttgcgatcagccagtttacggatacgatgccggcatcgttcgcaaatttggcacccagcggcagaatcaggaacgcgccggaacacagcaccataccaatggcgaatttcatcggcatcggcagcgtatcgcccatcctgttatagatagcggccagaatcgggctgccgataatgatccagaatgggttcagcgcctgatactgttccggttcgaacgcgataccgagaatagagtgctcgacgttacgaatggcaaagaagttcagcgacgtcggcatctggctgtacagtacgaagaagataatcgcctgcagcatcaaaataaaggcgacgatcattttacggcgagccgcgccgtgcatggaaaacgcttctttaccgaagataatgacgatgccaagagcgattacgcccagcaccatacgtgcgatatcctggttgtgcagcagccaggtggcgaccgcaatcagaacgacaatacccacgatggtcagcagcagattacggaagttgatcggttcaaagtcgggtttggaaccgtagcttttcacccagcgctggcagaaagcaaagttaacgacggttatcagcataccgacgacgctaagcgcaaacgcggtgctccagccataacgcgccgccagccacggcgtcgccagcatagagaagaaggagccgatgttgacggacatataatacatcgtaaatgcgccgtcgagacgcggatcgtccttcgcgtaacaggtagacagcagggaagacgggttagctttaaacagaccgttacccacagcgatagccgccatgcccatatagacgatgccagcgtcatgaccagaccatgcgaccagcgcataaccgatagccagcaccacggcacccagcataataacgcgtttggtgcccagaattttatcacctaaccaaccgccaatggcgaccaggccgtacaccagtgcactgaaggaagagaaaagggtgatggaatccgcttctgacatacccagttgttttaccaggtagacggccataatgccttgcaggccgtaataaccaaaacgctcccataactctatcgagaagatgagatagaacgccttcggttgtttgaaagcgttcaaactgacgctttcagttggttttttgtttgcagtagacacttttacctcttttttacgccccgtattaacagggattgtctggcgcgtgatgagtcagactcatccgtccgattgttatattggaggggaaacggcaggtaatgttcactatctttcctctccagacaagagctttgtaataatctgttacatataactcttctggttgaatcgtccgatgtcagaaatgttatccagcgttaaatttcttcatttgaagaatggcagatttttacactgcaaaaaggccattagtttgggtgaaaggcgatatcttctgctatttaaggtgaaaagcagtgatataggccattatctgaaaaaatggcagagtaatgttttgtagtgaaaacggggcgtcagtctatccggttgtaaatgtaaccttagatgtcattaaatttcacatgaagttatcaaagtgatcctgatcacggatagatagaattttttgcgattaaaaaaatgattaacctgacgtggagtgaaaacgaaagcacattacatcagaaaaaggacagagactggaatgattgatggctaaaatagatccaggccgaaggtgggagcgcgctggcgtgacggacgcactccgaccatatcaaatatcgactttttctttgtattcgcaaagatcttcaatgaggcaggagccgcagcggggttttcgggcgatacaggtatagcggccatgcaaaattaaccagtgatggcagtccactttgaactcattcggcaccactttcagcaacttctcttctacctgctcgacatttttacccggcgcgaactgcgttcggttgcatacacgaaatatatgcgtatcaacggcgatggtcggccagccgaaggcggtatttagcaccacgttagcggttttacgccccacgccgggaagcgcttccagcgccgcccgatcctccggcacttcgccattatgcttgtccagtaaaatacggcaggtcttaatcacgttttccgctttactgttaaataagccgatagttttgatataggatttcacgccctctacgcccagctccagcatcgcggctggcgtattggcgaccgggtaaagtttggcggtagccttgttcacgctgacgtcggttgcctgcgcggaaagcaacacggcaatcagcaactcaaacggcgacgtgaaattgagttccgttgtggggtgcggattgttgtcgcgcaggcgcgtcagaatttccagcctttttgctttgttcatcagactttccctgtttcacctgccggaacagcggaaggcgcggtttcggcgcggcgtttcttcattttttcatcaataagatattttaccgccagcatgagccccaggccgataaacgcgcctggcggcagcatcgccagcaggaaaggcgagtcggtgtgaaatatctcgacccgtaatacttttgcccagcctcccagcaggctatccgcgccatcgaaaagcgtaccattcccgaggatctcgcgcagcgaacccagcacgaacatcgcgcctgtcgcgcccatgccgatggaaaaaccgtccaacgcggaaagccacggtccttttttcgcggcaaacgcttcggcgcgaccaacaacaatgcagttcgttacaatcagaggaataaaaatccctaaagactgatacaaaccgaacgcatacgcattgatcagcatctgtactgcgcttaccaccgaggcaatgatcatgacgtaaatcgggatacggatttctgccggcgtccagcgacgtagtgcggacaccgtaaggttggtcagcgttaataccagcgttgtggccagacccagccccagagcgttggttgccgtagacgtcaccgccagtagagggcacaggccaagtagctgcaccagagcagagttatttttccataacccctgaacaacaatgtcttttatttcgctcatggctattctccacaggcggttaaatgggggagctgagcgggcagtgattcggcgtacagccccgcgcgtttaaccgcattcactacggcgcgcggcgttattgtcgccccggtaaattgatcaaaatcaccgccatcttttttcaccgcccagtgcgtatcattttcaccactgatggttttaccgctaaagtgggtaatccagtcagacaaacggcgctcaattttatcacctaaccctggcgtctcatgatgttccgtcacacgcgtccccaggacggtaccgttgaaatctgcgccaacaataagctggatagcgccggaatagccatctggcgcggtagcctcaatgatggccgctacgggtttatcatccttgcgagcgataaaaacacggtgtgtgcctttgccgagggcgggcgcatcgaccagataacaactctcttgcagattattattgtaacgatctggcggcaatacctgatcgaacagggcatgttgttgttgcagcgcttgttcgtggatggttgattttgtcatctgattaatcaccgcggtcaatcccgtagagcctgcggcaaaaagcgccagcgtaataccgtgtttacgaatcgttttcagcatggtttatcctttgcgatgtccatagacgcgggggcgcgtgtagtagtcgatcagaggaaccgtgatattcgccaacaggacagcaaaagcaacgccgtccggatagccgccgaagctacgaatcagccacactaataccccagccagcgcgccgaaaattaaacgtccacggttggtcgtggaggcggtaaccggatccgttaagataaaaaatgcacccagcatggtggcgcctgacagcagatgaagctgcggcgaggccagcgtagcgggcgagaaaagccagcctaacgcggcgcatagcgccagcgtcagcagaaaactgaccgggatatgccagcggatggctttttgccacagcaggaatacgccgccgacaagccaggcgaggttaacccactgccagcccacgccagccagcgcgccgctgtatatcgggtactgcatgatttgctcaacggagtgcccggcgcgcaaggacgttttaaacgtatccagcggcgtcgcctggctgataccgtcaataccgatacgtagcagcgtcatatcgccgccgctggcggtatgcccggtaaaaatcatccgcaacgtgtccagcatatcgggcgttgttgcggctatttcataaggcggcaaccagcttgtcatttgcaccggaaaggaaattaatagcaccacgtaaccgatcatggccggattaaaggggttttgtcccagcccgccatataactgtttagcgataataatggcgaatccggttcccagcacgaccatccaccagggcgcaagcggagggatgctgaccgccagcaaaagccccgtcaataacgcggaataatcctgcaggtgactggcgaccgattgtttgcgcagcctgaggacaatggcttctgcgacgagcgccgtgatagcagccagaacgatctggaaaagcgttccccaaccaaaaaaccacgtctgcgcggcaatccccggcagagcggcgattaataccagcaacatgattcgcgatgtctggcgctggttatgggtataaggcgagcttgcgattctgaataccatttaatcctcgttaacaacctgctgctgtgctgctttttttgcctgaacgcgggcgatagccgcagcaaccgcggctttacgcgggtcggccggttcggcaggttcgcttccggcctgctgctcctgcttacgggctttggcgcgagcgatggccgcttccactgcggctttgcgcggatcgatcggttcggcaggttcgcttccggtctgctgctcctgcttgcgggctttggcgcgggcgatagccgcttccaccgcggctttgcgcggatcgaccgcttcggcaggttcgcttccggtctgctgctcctgcttacgggctttggcgcgggcgatagccgcttccaccgcggctttacgcggatcgaccgcttcgaccggttcgcttccggcctgctgctcctgcttacgggctttggcgcgggcgatggctgcctccaccgcggctttacgcggatcgaccggttcggcaggttcgcttccggcctgctgctcctgcttacgggctttggcgcgggcgatggctgcctccactgcagctttactcgggtcgtcgccgggtatcgcgctgtcagccatcggatgagcggcttgtttagcgcgcgcttgcgctttacgcgcttcacgggccgcgatgacggcgctattgtctggctgactacccgcctgaataaccaccggttgcgtggcctgcgcctgtttctcttttacccgcgccagcgcagcggcaatggcatcctgatcttttgccgctggttgtaccgctgcgctcttgtgacgtgcaaggcgggcggctttttcgcgctccagtcttgcctgacgagcctcaaaacgcgctttggcttcggcggcgcgtttttcttcaagcctgatcgcattaatctccgctttttcctgacggaaatattggacgagcggaatattactcgggcagacccaggcgcaggcgccgcattctatacaatcagcaatatggtgagcggtagccttgtcatgctgctgccctttgctgaaccaataaagctgctgcggtaaaaggtcggcagggcaagcgtcagcgcaagcgctgcaacgaatacagcttttctcttcctgaggcgctcccatttcagtcacggatggcgccagcaggcagttggtgatttttacgaccggtacgtcaagccagggaagggtgaatcccatcaacgggccgcccatgatgaccatctggtcagcagaagggcagaacccggcatcgttaagcaaatgacgaacgggagtgccgagccgcgcccagacgttacccgggcggcttaccgcttcacccgttaaggtgacgacgcgttctgtgatcggttcgccgtcaatcacggcgcgtttaacggcatacgccgtaccgacgttttgcatcagcacgccaatatcagaggagcgcccgccgtggggaacctgttttcccgtcagtattcgggtgagctgttttgcgccgccggaagggtatttggttgggatcacacgtaacgaaatatcgtgggcgtcagccagtacggcgcgcagcatggaaatagcctgcggtttgttatcttcaatgccgattaatacctcacgcggttgcagaatatgcgccaggatgcgaataccttccacaatctgcgcggcgcagtcctgcatcaaacgatcgtccgccgtaatgtaaggttcgcactctgcggcattgataataagcgtggtgattttatcgccgccgccctgcaatttaacgccggtgggaaaccccgcgccgccaagcccggcaacgccatactgatgaatgcgttcaatgagcgcttcacggctgtgggcgcggtaatcagaccagccctcgcgttcaatccagcggtcctcgccgtcggcatcaatgattacgcttaactccgccagcgccgaaggatgcgccgtcgagtggggggcaatagcgataaccgtcccggaggtgggcgcgtgtaccggcagcattctcccacgtccacgggtaagcgcctggccgcgtagcacgcgatcgccgacgctaacgcacagctcgccctcagcgccaatgtgctgttttaaagggataacaaagcgcggcgctaaaggcacctggcgcagcggcgtgccgtttgactgggtcttcatttcgggcggatgaataccaccgtcgaaatcccagattttatcttttctgaaagcggaaaatagtttaagcatgttgttccacgggaatgatgcgaacgggaatggtgttcaaatcccatttccaactgtcgggcgtctcattcaccggacgtaattcgatgcagtgcgtcggacacggatcgacgcacagattacagccagtacagagatcgctcatgaccgtgtgcatggcgcgcgttgcgccaacaatggcgtcaaccgggcaggcctgaatgcattttgtgcagccaatgcagttattttcatcaataactgccagcatacgtactggcgcagcctgctgttcttcaccatcgcatggttgcggctctacgtttagcaactctgcaattttcagcatgacggcttcgccgccgggcgcgcaacgattgattttctcgccctggagacccacggcttcggcgtaggggcggcagccgggatagccgcactgaccacactggctctgcggcaaaatcgcatcgattttttcaacaaccggatcatcttcaaccgcgaatcggcgggaggcataacccagaatggcgccgaacaccagacccagaagggtcagggcgccaacggcaatccagatagtattcattacaacttcaccaaaccactaaaacccataaaggccaaagacattaatcctgcggtaatcaatgctatcgcgttaccacgaaaaggggcgggcacatccgccacggcaaggcgttcgcggatagcggcaaacagaaccatcactaatgaaaaaccgacggcggcggaaaatccgtacagcgccgactgaagaaagtgatgaccgagattaatattcagtaacgctacgcccagaaccgcacagttagtggtaatcagtggtaagaagatgcctaacaagcggtataacgccgggctggttttccgcacaaccatttcggtaaattgcacgaccacagcaatgacgaggataaaggctagcgtccgcagataaatcagatccagcggaataagtatccaggtgtcgataagccaggcgcatatcgacgccagcgtcatgacaaaggtcgtcgcgaggcccatccccatggcggtttccagttttttggatacgcccataaagggacaaaggcccaggaatttgaccagtacaaagttattgaccagtacagttccgacaaagagcagcaggtaatcagtcatgtttcggcctgaaataaaaaagccgcctattatctgtcaaactaccacaggcgacaacaggttaactgtagggttattacggattaacaaacgttgttttaacgcgcgctgaacgtttgagataaggcacaatgagcgccgttgccaacagtgggaagagtaactgacgcacggcaaaggcatctgagacgggcgaaaaggcaaatgctttaaccgccagtaacaccgacaccagcagccagataatgtaatgcttcggcacgcagcgtctgcgcttgaagaatgcgatcgtcaaccacagggtatagtaccacatggcgatagcggtaataaatgaaatgccccatagcagtaaattaccggtttcctgtccgctaagcgtcttgaacgtttgcggtgtggcaagcgccataacgtagagtaataacgccagcgaggcgctcaacaacgcgactaacagccaggctaacgggccaagaagccagcctccaattcgttgtggcggtgttgtagtcatatcttctccggggttacgcgcattaacggtcatgccgctcattttggggcaaatattataaggtttttgatgttaaacgctactttctttattgcacatagcgccagacggattgcggaacctgacctacatcaaacaggcgtcctccggaaaccagttcggcacggcggtgatctgcagcgcgatacatattaacaatgtccatgtcatcagtaagggtatagttaaggtggtcgaacagtttttccagactttcgagcgaactaattttgcggaattttaatagataatcctgaacagtcatataaagttgatccatattaaatataatgccaacggagtagtcactgataaaaaataaacaaaaccgcaccagtgagaggtcaggggtgcaggtaaaaagggaatattcttaccggtaaagagtcaggcgccacatggcgcctggggcgaaaggttaacgcgctttcctacaacaggcaataaacgtcagaccagataggacatatttcgttttttttgccggtttttgacttttctttgcaccccccggggcgccgcttaccgtaccacgcgaaaatgcctttacattatctgacgcttacttcttctggacggaagccgtgggctctggtggttggtaattgtcaatatggttggcaatacctaaaagaatgactgagataacgagaactatccacccagttaattcaataagacgattcattattgacgacatttgctttgatttatccataaacacagggggtaaatgttactttcctggcgaacggtcggcaagagggagggaaacgttttcagcctctgttctgtaacaagttaatcatttgatgctacgttgatggtcaggacgctattgcggctaatcgcacgatggtgtggaatagcgatatctaaaaccggaggcagtgagatgaatgataaaatccgcgttgggttaatcggttatggctacgccagtaaaacctttcatgcgcccttaattatgggaacgccagggctagagcttgcggcggtatccagcagcgatgaaacaaaagtgaaagcagattggccggcggtttccgtggtctctgagccccgacatttatttaacgatccgcatatcgaccttatcgtgatcccgacgcccaacgatacccatttcccgctggcgaaagctgcgctggaagccggtaagcatgtggtggttgataaaccctttaccgtgacactgtcacaggcgcgagaattggatgcgcttgcgcggagcactggtcgggtactttccgtcttccacaaccgacgctgggacagcgattttttgacgctgaaggccttgctggcggatggcgtgctcggcgaggtgtccttgtttgaatcccactttgatcgcttccgtccccaggtgcgcgaccgctggcgcgagcaaggcgggccgggaagtggtatctggtacgatctggcgccgcacttgttggatcaggccattcaactttttggcctgccggtcagcatgacggtggatttagcgcaactgcgtccgggcgcgcaatctacagattatttccacgcgattttatcctacccccagcgccgcgtgattttgcacggtacgatgctggccgcggcggaatccgcgcgatacatcgttcatggttcgcgcggtagctatgtaaaatatggcctcgatccccaggaagaacggttaaaaaacggcgagcgtttaccgcaggaagactggggatacgacatgcgtgacggcgtattgaccctggttgagggagagacgcgcaaagaagaaaactggcttacgttgccgggtaactatccggcatattatgccgccatccgcgatgcgttaaacggtaacggtgaaaatcccgtgccagcaagccaggcgattcaaattatggagttgattgaactgggcatggaatcggcaaaacatcgcgcgacgctgtgtcttgcctgagatgtcgcatttctccgcctgggatagcattaaaccgcaggcggagagagggcgttagcatcaataaagcaatcttacgcctcggccactttttcgcgcagcgcacgtttttcgctatcgctcagaaaggcgatttccagaccgttaatctgcgcctggcgaatctgttcgcggctcaatcctgccgctggcgcggcgacgtgatattcatggataatatctacgccctgaacagccggatcgtccgtattaagactggcgagaacgccatgctcaaggaaggttttgagtggatgatccgccagcgatgcgacggtactggtctgaatattcgaggtcagacaggattcaataccgatacgctgctgtgcaagaaaatccattaacgcgcgatcttcgacagcttttacgccatgtccgatacgttcggcccccagttcgcgaatcgcctgccagatactttccggccctgcggcttcgccagcgtgaacggtgatatgccagcccgcatcgcgcgcccgattaaagtgcgacaaaaacagactgccgggaaagcccagctcatcaccggctaaatccagcgcggtgatgttctctctgtgcgccagcagcgcatcaagctcctgtaaacatgccgcctcgccgaaggtacggctcataatgccaatgagtcgtgcctcgacgccaaacgtgttacagccgtcgcgtacgccgtcgataacggcttcaaccacgcctgcgattggtaactgatgcgccatcgccatatagccgggcgaaaagcgaagctcgacgtaatgcaggccgttacgtgccgcatcttcaatattttcaaaggccacacggcggcaggcgtcaagcgatgccaggacttttaccccccaatcgagtttagtgagaaagcttactaaatcgggttcggttgaggtgacctggacatgcggaatcagcgtttccagcgtttgggcgggaagggcgatgttgaactgccgaccaagatccagaattgtttgggcgcgaatgttgccatcaaggtggcggtggatgtcagtcaaaggaagcgtaatatcaatcatgggcgcactcaatttttaataaaagtgcgcaccattatactacagattgataatgctctggaaattttgcaaaaacggagtcattacgttgcaacttcgcgagagcgcgggagaaattttgtatcattctctttaacgcgcccccggtcagctcacgggggcgtctctgttatcgcctctcaggataaagggtcaaccccccgcctgtagacagtatcagcgaacggtgcggtggcaaaatccatatccgagatcgtaaaggggagcagatcggcttcgccaaaacgatcggcgacataatcccactacgtacaccatgtcccgcgtcggtcaacttcctgtgaaaaatcgaacatatcccttccttatgcctgaacggtattcatcaggccaaccatttcatcttttaccgactgaacctgcgggccgataattacctgcaaattatgctgattgagctgtacgatgcctgtcgcgtgattgtccttcaatgcctggacatcgacaaacgacatatctttcactgacaggcgtagggggatgcagttgtccagactcacgatgttttccgtgccgcctaatgctcacgacgagcaccatgtgcggagtcaaacgatagccgctcgcctggtaacgcaaaagtagaggctgcgcgtcgttcggcgcagaccgggtgcagcgtcgcgacacccggcaaggcgattattgttgaggcagcgccggaacgtccggaacggaaagcgccggcatcccaaacaggccgacaaagtcttccaacggcattttttgtccgttgagcgtgatctggccattggcgtactgcaaactggaggcgatagtattatccttcagcgttgtcagtcggaacatctgacccattgcggacagcccctgcacctgctgttttgccagtttttccgcatcatcctgctgatagccttccagttttgctatctgcgtcataaactcgaccgccatgtccattggaattgccagtttcgcatccagcgatttcacggagcggtcgacttcctgcgccagcgtttgtggttgtgccgttgtggttgccggatctttgaggaacagcgacagattcagcgtggtttcccctttggcgtttttccagctaagcggcgccagagtcagtaccggatcgccttttaacagcacggggagagcgctaaagaacgcttcggtgactttttgctgataaagctcaggattctgcgccacgtccggctgattcagcagcgcctgcgtttgcgcatgatattgctgactaaactggtgccaggcttcgccgtcgatttggccgactttcagcgttaatttaccgctgcccaaatcctgattctgcactttcaggctgttaagcgagtaatccaactggctgttaatggtttttccgtcgttgacgagatcggacttgccggtaatttccatcccttccagcaccgccatctctttaccctcaatggcgatggacagtttatccagcgttaacttttggtcgcccacacgttcgccaaagcttgccagtttactggtaccgtcggttttcaaattattaaaggtgagttggaccttctgattatattcgttaacggcatcgaccaggccgctctgcgcttcgcctgacagcgaaaccacattaccgtctttatcggcgttaagccggaactcgccgccgctaaaggcgaccttttcaccggcattctcgtagtttaacggcttgagagagatatcggagcgggtatcgccgccataaccaatgcgggtattgataacaaagggcgcgtcgcctttcgcaatatcaaagaggggttttgccgcatcgttattcaccagagtggtttttaccgacgccatagaagggatcagattgagcgttttgagctgggcgagcgggaaggggccatgtgaaacggactcgtccagcacaatgctttgcccgggcttcaaccaggtattgtctgcgccggcaaccggtttgacaaccagttgcagatggctactgaacacgccgcgctggtagttttgataacttaattcgacaccggcctccggcgcagtacgcttgagctgttcattggcctgagtcaccatttctgcaagatggttctccagctttttccccgtataccaggcgccgcctgtccagacgatgccaagtgcaattactacacctgcagctaccagtgtttttttcatatcaattgtccataaaaatgaaaccaggcggattaaaccgcctggaggagttttacgtctgttataagcttagcaagagttgttaaaaaattcagtacgttgctacagcttgttataaacacgcgctaaacggcccgtgccgctggcgttaaccggagactcatccgcgccgataaaggcagattcacccggcttcagtaccagacgctgttcatctttacgtaacaccgcctcaccctcaacgcagaacagaatcgcggcgctgtgttggccgatgctcgtctcctgaagcgccaggtcgtgcagtgaaaaagcaaaatcgtcaaccggaattgggaagtccagctccgcgccgcttttcaccggggcagtcagcaactcgccggcaggcttaggttcgaacttcacgttcgcgaccagctcagggatgtcgatatattttggcgtaaggccagcgcgcagaacgttatcggagttcgccatgacttccagcgcaacgccctgcagataagcatgaggcgtttcagcaaacaggaacatcgcctcgccgggattcagtttgaccacattcagcaacaaaggagagaaaagcccgctgtcgtcaggataatactctgaaatcacgcggatcgtttgccacggttcgccttgctggctgttaagcgccgctttgagtacggctaacgcgcgggatttttcttcgccttgcatattcaacaggctggcgaaaagctggctcagacgttcagcattcggcacctgcaaaaagtgggcgatagcggaatgcgcgccggcgacaggttgcagtaaagagacaatgtcagaaaattcgcggaacgcgttcatcgccaggaaaggcgtcagggcaaaaaccagctctggtttatggttaggatctttatagttccgctctgcggcatccatggggatacccgccgcattttctttcgcgaaaccgatttcggagttgcgtttattcgggtgcacctgaatagagagcggttgtgcggcgcacagtactttaaacagaaacggcagttcgccgaaacggttggctaccgcttcgcccagcatggcggttttattcttttcgatggcgtcacgcagggagacggtttcgccgttggcggtggtgattcgcgagctgcttttgggatgcgcgcccatccagagttcagccattggctgctgctgcggattggcgatgccataaagttccgttaacgcagttttacttccccaggcatagttttgcactgagttaatgagtttttgcattatcaagccctgtttcaatgtggagatcaatgggaggtattaaaccaagaaacccgcatgaagtaacctccgggcgtaaaaagtcgtacttgtctcagtttttgttaaaaaattgtgtaggatagtgttactcgctttgagtcgggcaatggaacacctgcccagagaataaccataccgagcggtaagtgagagcacaatgtcaaacaaacccttcttttatcaagacccttttcccctcaaaaaggacgataccgagtactacttgttgaccagcgaacatgtttccgtcgccgaattcgaaggacaagagatcctgaaagtcgcgccggaagcgctaacgctgttggcgcgtcaggccttccacgatgcgtcttttatgctacgtcccgcgcatcagcagcaggtggcggatattctgcgcgatccgcaggccagtgaaaacgacaaatatgtcgcgctgcaattcctgcgaaactccgatatcgcggccaagggcgtgttgcccacctgccaggataccggtacggccattattgtcggcaaaaaaggtcaacgcgtctggactggtggaggtgatgaagcggcgctggctcgcggcgtatataacacctatatcgaagataacctgcgctattcacagaacgcggcgctggatatgtacaaagaggtcaataccggtactaacctgccggcgcagatcgatctctacagcgtcgatggcgatgaatataaattcctctgtatcgctaaaggcggcggatcggcgaataaaacctacctctatcaggagacaaaagcgcttctgacgccgggtaagcttaaaaattatctcgtcgataagatgcgtacgctgggcaccgccgcttgtccgccgtatcacatcgcgtttgtcattggcggcacctcggcggaagcgaacctgaagaccgttaagctggcctcggcaaaatactatgatgcgctaccaaccgaaggcaatgaacacgggcaggccttccgcgatattgagctggaaaaagaattgttgcttgaggcgcaaaatcttggcttaggcgcgcagttcggcggcaagtatttcgctcacgatattcgtgtcatccgattgccgcgccacggggcatcgtgtccggtaggtatgggcgtgtcctgctccgcggatcgaaacattaaagcgaagatcaaccgggacgggatctggatcgagaagctggagcgcaatcccggtaaatatattccagaggcgctgcgccaggcgggagagggtgaggcggtgcgcgttgatcttaaccgtcccatgagcgagatactgcaacaactgtcgcagtatccggtatcaacgcgcctgtcgctgaacggcacgattattgtgggccgcgacatcgcgcacgctaaactgaaagaacggatggacagaggcgaaggtttgccgcagtacatcaaagatcatcctatctattatgcggggccggcaaaaacgccggaagggtatgcctccgggtcgcttgggccgactaccgcaggacgaatggactcttatgttgatcagctccagtcgcagggcggcagtatgatcatgctggcgaaaggcaaccgcagccagcaggtgaccgatgcctgtaagaaacatggcggcttctacctgggcagtatcggcggcccggcagccgttctggcgcagggtagtatcaagcgcctggagtgcgtggaatatcctgaactgggtatggaggctatctggaaaattgaagtggaggattttccggccttcattctggtggatgataaaggcaacgatttcttccagcagattcagtcatcgcagtgcgcgcgctgcgttaagtaatgtcgccgccctgcggggcggtaacatgattcgctattttgccggagaacggcgcaagcgccttatccggtctacaccgttgtgttgttatcgttaatactcataagaccgcaaacatgtgagcaatgtcgacacatgatctcatcaacttgagtaaggagcaggtaatggtaacggtacgccgcgagaaagattcaatgggcgcgattgaagtcccggcagataaactgtggggggcgcagactcaacgttcgctggagcattttcggatttccacggagaaaatgcccgtctcgctcattcacgctctggcgttgaccaagcgcgccgctgcgaaggtcaaccaggacttagggttgttggcggcggaaaaagccagcgcgattatccaggcggctgatgaagtgctggcgggaaaacatgctgatgagtttccgctggcgatttggcagaccgggtccggtacgcaaagcaacatgaatatgaatgaagtgttagcgaaccgcgccagtgaaattttgggcggcgttcgcggtatggaacgcaaggtgcatcccaatgatgacgtcaataagagtcaaagctcaaacgatgttttcccaaccgccatgcacgtggcggcgttactggcgttacgcgaacaccttatcccgcaattatccgcattaacggatacgcttcgcgataaatcccacgctttcgccgatattgtcaaaattggccgtactcacctgcaggacgcgacgccgctcaccttaggccaggagatttccggttgggtagccatgctggaacataacctcagacacattgagcacagtttaccgcacgtcgcggaactggcgctcggcggaaccgcagtagggacagggcttaatacccatccggaatatgcccggcgcgtggccgaggaactggcgacgattaccgcggcgccgtttgttaccgcccccaataaattcgaagcgctggcgacctgtgacgcgttggtacaggcgcatggcgcattaaaaggactggcggcctcgctgatgaaaatcgccaacgatgttcgctggctggcgtccggcccgcgttgcggcattggcgagattgctatcccggagaatgagccaggcagttccattatgcctggtaaagtgaacccgacccagtgtgaagcggtaacgatgctatgttgccaggtgatgggtaacgatgtggccatcaatatggggggcgcatcgggcaactttgagctcaacgtctatcgtccgatggttattcataattttctgcaaacggtgcgcctgctggccgatggcatggagagttttaataaacactgtgcgtcaggaatcgagccaaaccgcgagcgtattacgcagttgctgaatgagtcgctgatgctggtcactgcgctgaatacgcacatcggttacgataaagcggcggagattgcgaagaaggcgcataaagaagggctgacgctcaaagcctcagccgtggcattaggataccttagcgacgaggagttcgacgcctgggtacgtccggagttgatggttggcagtatgacgccgggacgttaatccgccacatacaggtgcagtcgcggaataatcagtcgcagcggctgcgcctgtggtttaaaacggtgctgaatattgtcggcgtcatagttttccagcccgccaatatccggcacgccagcgccgttgtccgtgttgattaatgcgataatcggcgtggggcaggcgtgttgcacctgtttctgctggcctttataccagatgcgggagatcggctgtactttaaccggacgcttaatcttgagtcgggcctgctgcggtaaggcagcgatatcctgatattcccgttccagcttgaattgccattgttcgcgcgtccacggcgggacgctgcgcggcgacgcgaggctttttttcaactggctcagaacctcatcccggcttaaatttttaataatatgtttatttgcccagccgaaacgtatggtggcggggttattgataagcgtcagcgtgcggtaagcgttcagcgtaattaagccgggtagatgccgatgcacccactcaaaacgtgccgctgagggaagaccggactctaccgtaaccatctgctcgaaggtggttttcaactggttaatgcgctgtatctgattttccagatctaactgtgtcgcattatccacttgatagcataagacgccaggcaggcggacggcggctttactgctgcggttttcggactgctgttgaataaacaaatggcgatagtgacgtagcgccagcgcttcggcctctttccccagatgttgcgttacctcgatagtatccagcggcgcatgttccgcctctttggtcacctgcggcagtgaaaagacacgggcgataagtagcgaatgctgctgtagattatccgtcagcgccgccaggtgttgttctatctggcgaaaagtgccattcaggcgttcaacgagatcgtagcgggacatggtatcactcactttagttacaacatactatatgtatagcacagttcccgccgctcaaccagcgtgcaaaatgcgtcaggcagcggtcatgtcgggcatcgcgtgccagaccggccagcgaaagctaaattttgcgccgcccagttcgctctcgtcacagacgacgctaccgcccatcgccagggcgatagagtgtacgatggcgagtccaagcccgcagccgcctgtcgcccggtctctactggggtcgagtctgacaaaaggttcaaatacgcgctctcgcgcatccgcttcaatgccggggccatcatcttcgactatcaacgttgcctgactgccgtcgagtaacagactgacctgaacggtggtatgactgtagcgcaacgcattattcagcaggttatccagcactcgcgacattaaccgcatatcaagcgcgccataatcgccgattacacatgtgacaaggtttacggcacgttccggggtcacgctctgcacatcctgcaaatgcgcgagcaaccaggcggggaggtcgggttcggtcaacatcagttcattttgtggtcggtcaaggcgcgcataggtgagcagttcttcaatcagcgcttccagttgaccaatatcgcgattgagcgcctgtgattccggcggtgtcagattttcactcatttcaagccgatagcgtaaacgtaccagcggcgtgcgaagctcatgggcgataccgtcaatcagctgttttttactggcgatcagggcattaatgttatccgccatctggttgaacgcgacgcccagacgttcgaaactggagccattatcgaagtgcaggcgttcagtcaaatgaccctcgccaaagcgctgcgcggcggattcgagcctgagcatttcttgccagtgcgggcgcatccagataaacacaggaaaggcgagagaaaaggcaatgagcgccattaaggcgatatccagcagtcgcatttgatgcaggaaatagagatagggaaccgggccaaccgccaggacgtaatggctgcgcgggatacgctgaataaaggtgtattgatcgtcaagcgcgacaatatcgccttcacgcagtcgctgcgtggtggcggcatcaagcttatagtgatttaacggttcaacgcgtaaatcgaaagagaggttcaggtccatctcttttaacgttttcccccattcacgcggcggaatttcccgcagttcgctgcgcatcagatagagcgaacttttcatcagatcgtcgagcgattgcctgcccgcgcgttcggcggtgaatttgtacaccagtccgaccaataaggtcatgaccagaaaacagacgaacagcaaaaggtaaaactgcacaaacagctttttcatcaacgcccaccggatctcaatacattagctctatcgcgcgctgacgaaaaagatttcccgtcagcgccgctggtgggttataaaagcaggctttgcgtcaactgacaacctcattgtccggcgttaaggtccggactttcgtgaacaatgcgtccatcgacaagcgtcaaaacagcgcgaatggtatcaattctgtcttccggcatcgtcataaatggctgattgagtaccgccagatcggcctgttttccgacgcgaagctggccccggtgttgttcggcaaaggcgagccaggcggcatgacgtgtatataacgctagcgcttccagacgcgtgagccgctcgctggcgggtttacgcacggaaccgcctgacgctataccggtgatatgatattcgatagcgtgccagacaccggcaatgccaatacgcgtcgaatcggtaccgccagctacgacaagccctttatccagcgccagtcgaaccggcggcgaattgtccgtcgcgccgggtggattggcgtcacggatggcaagcccctcaaagtaaggccccatttgcacagtgtatgccagacccagcttacgcattcgctcaagcgtctgtggcgaaccggtattcagatgcgcaatagaccaacggagagggcgcagatcgtactgctgagctacctgctcaaaaatcgtcaatatcgcgtcggcgctatcatcggtataggcgtggatctcaagcggtattccccgttttgccgcaaatgtcgcgacctggcgaagcgcggttttgtcctgctctgaggaagaaaaccctggggccatccgcacgccgtcattcattccggccaccaggctttcccccaggccaagaaaagccagttgcccgtcatcggcacgcgccgggcgaaaggccatcaggttgctgaaccactgcgcttcatgacctttcgcttctggctgtaccggaatgcgataccccacgcgcagcggtaaatccccctggtttcgcattgcaaataaaggctcataagcggcggcaggcccggcagaggggtcaatgatgccggtcacgccgcgagcgttcatatcagcgaaaaattgccgcagaccaccctcacgatcggcgttacgacttatgctggcaaaaagctggttaaacgcggcgatgtcaccaaataatttccccgtggcgctaccttttgcgtcgcgctctacgcggattcccgctaaatcaggaggaggggtgttgttaaggccaagtacgtctataccgcgctgattcactaacgcatagtcgtaaagatactgaatataagccggatgatcgggaagggcgtgactcagttcggctaccgtcggcgcccggttttctgcaaattgcgccggtatccacgatcccactacggctacccattgatcgtggggacgacggttagcgtcggcgcgtaatttatccagcgcgtctttaagcgaagggctgtcgtaccagtaggtttcgaatgtccaggtttgtccgccgcgaatggcgtggatgtgagtatcggtcaggccgggtatcacggttttaccctgtaaatcgatggtacgggtatggtcgccgcgccattcatttgtcgccgtatcatcgccaatcgccacaatccgcgagccggaaatcgccagcgcgctggcctgcggctgggcatcattcagagtgatgatattaccgttatgcaaaataatatccgctgccgggcgggcggcggtggctgcgcctgtggccgtgagcagaaagagaagcgcggttctggaaagcagagacgggacgagactgatcattagcatgttccttttgtcgggcgataagcaaaccatagagagcgaacaagaattgttcaatctgtgcccagggaactgtgcgttctgtttttagaacggtggtgatgaaaaaagaaaagcccgccgaaacggcgggcttgagaagaattaatgaataattagaactggtaaaccatacccagcgcgacgatatcatcagtgctgataccggcatctttatagaactggtcgtcatcatccagcaggttgattttataatcaacataggtggagaagtttttgttgaaatagtaggtagcacctacatcagcatatttaaccaggtctttatcatcgccattaacgttgttataggtcaaatctttacctttagacatcaggaaagaaaccgccgggcgcagaccgaaatcaaattgatattgggctgtaacttcgaagttttgcgttttgtttgctacgcatgagcgacaatcgtcattgccgtaaggcgtcatattacgggtttctgaatacattgtggccagatagatattattagcatcatatttagcgccaacagtccatgcatccgctttatcaccgccagcggtagagtaattaacctgaccattagtacgatcggaagtggtatatgccgcgccgaaacttacgcccatacccagatcataagttgatgagataccgaagccgtcaccgttagcgttcttcacgttacgatcgccgccgttattagtgccttcctgctcatgagaaacctggttttcattggcaccctgatattgcaacgcgaagttcagaccgtctaccagaccgaagaaatcagtgttacggtaggtggccacgccgttagcacgaccggtcatgaagttgtcagcgtaagtgtaggagtcgccgccgaactcaggcagcatatcggtccagccttctacgtcgtacaggacgccgtagttacgaccatagtcgaatgagccgtagtcgccgaatttcaggccggcgaatgccagacgagtccaggaattagcaccttcgccttcggtagtgttagcctgaacgttatattcccactggccgtaaccggtcagttggtcgttaatctgtgtttcgcctttaaagccgacacgcatataggtctgatcgccatctttagaagagtcatcagagaaatagtgcaggccgtctactttcccgtaaaggtccagtttgttgccgtctttgttataaatttcagcggcgtgtgctgcgccagcagccagcagagccgggatgacaagtgccaatacttttcttttcatttttttatccttaaaaacttaacttatttgcaaaagattgaacttctacagattcgttgaatcaaaggcatcctaatctgaataatattatttcagcaaatgctaacttttcttatatgttattaattaatacaaaagttactatcggaaacgcatatatttatggtgaatatatttgttattatgtattcatgtatgtgatttgttttatttcacaatttgcgaaaaaagatggcaatatagcggcgggcagacattctgttatcaattttgtgaactggcttcgagtttttttaatttaactttcttgagcgaaaaagacgtaatcatgaaccacaacgcagagaaaacggtaataaaggggccgtttcgactaataaaaatagcattcatgtatgcaatgtctgttttttgaacagtggcggtgatgagcatcgccactatgacttgataaaggcaggtaaaatctgtcggctaacttatcccgtcgtttcgtcccaggcatgaggggcaaaaagatagcctttattgcgaatggtctttatacgatagggctcagcagcgctatccagcagtttcttacgcaggcgggaaatcgctacatccacgctgcgatccagaccatcataattgacgccgcgcagcgtttttagcaacgcgtcgcgatccataatttgtccggcgtgtgtcgccagttcccagagcaattcaaaatcggcggtggagagcgatatgaaatcgccattgagctggaccgcccggttaaggggatcgatggttaacgcgccaaaacgcagcgctttatgcggcgtaagcgcgctctcctgaagactttttgcctgttgcgtttgttcgctttgccgcaggtgtaagcgcagacgcgccagcaaaacggccggaggcgtggttttgaggatgtagtcgcaggcgcccatctccagcgccagaatatgattcatatcactgtccagcgaggtgagcaggacaatcgggccttgccagcggtggcgtaaatcgcgacatatcgtcatgccatctttacctggaagcataatatccagtaaaaccagatcgggctgagtggtgaggataagatcctccgcccggtcaccacgcggctcaacaatgacatcaatatcatgtttcgccagataagcggcaatgagagaacccacttcagcgtcgtcttcaacaaatacaatgcggttcatattataaatggagaatagaaaacgccaacatacaccgcctctgttttcccttccataaatattttctaaacgagagcggttccgttatgctacacgctgttgttattagcgtgttaaggcaaggtaatgggactcgtgattaaagctgccctgggggcgctggtcgtcgtattgattggtctgctgtcaaaaacgaaaaattattatatcgccggattaattcctctgtttccaacgtttgcgcttatcgcgcactatatcgtggccagcgagcggggcatcgacgcgatgcgtaccaccatcgtctttagcatgtggtcgatcattccttatttcatttatcttgcaacgctatggtatttcagcggcgtgatgcgcctgcccgtcgcgcttggcggtgcggtggtctgctgggggctaagcgcgtggctgctgattttttgctggattaaatggcattaatattggcaaagaccgtggtttccccatcgtaatacagacggatattacgatggggaggttgtcaacccaccagcatccacgtagccggaaccgccgcgaccagcaataaaccaatcagcacgacttcctgacgatttaacacgttgtcatgcttgtgcgtccgacgcgcatacaggaaaaccagtaatccaggcgcgtacagtacgacggacagcagcaggtgcatgggacccgacgcgtataacaaccataagccataaatacaggctccgataccgaccgcccgatggaggggacgtgttgcaatcttcagcagaaatgcgccgaccagaaagtagggcaccagaatcatttctgacgcaatcgtcaatagcgtgttgtagtccgaaccggtcagccagatcagcaccagacagatttgcacacagatattggtgagccataacgatgcagaaggcgcgccttgcgcattttgtcgcgcgaagatgcccgggaaggatttataggctgccgccagaaatggcacctccgccgccataatagtccagcttagataagccccgcagacagacacaatcagtcccgctgcaataataatttctccccacggccccatcatttttaccattagtccggccatcgacgggttacgcatctccgccagttccggacgcgcaagaacgccaagagaaagcagcgtgaccaggagatatattcccagcgccgcgaggaccgccagtagcgtggcgcggcctacatcgcgtttatttttcgctcgggccgagacgacgacggcgccttcaacgccaataaacacccacagcgtaataagcatggtgttcttgacctgttcccatacgggaataccgagttcaacaccagtgaagtccagtgtgaaggtatccagtttgaacatcatgatagccagcacaataaacgcgccgagcggcaacagtttcgccagagtcgcgaccagattgatgctggctgccgtttgtacgccgcgcaggatgaggaaatggacaatccagagcaagactgaagcgccgacaatagcctgccaggtattaccgtcaccaaacagacgcaaggcaggcgtatcggtaaagaaactcagcgctgaaaagacgataaccaaataggatacgttggcgatgaccgcgcacagccaatagccccaggcagaacaaaagccaatcagttcgccgaagccttcgcgggcgtaagtaaagataccgccgtcaagctcggagcgaatgcgcgtaaggattaacatggcgaatgccagtaagagtatccccacgccggtaatggcccagccaattaacaacgcagccggactggcaacggcggccatattctggggcagactgaaaacacctgcgccaagcattgagcttaaaaccagcgcggtcagcgcgctcagtcccagttttttttccattggtatccagctataaaaatgaaattggaagaataattattatggcaaaacgcataaaaatggtgaaagccactaaggcgcgggattttacggagagaagggaccgcatgcaacggcctggataagatttatcgccaaaaaagcgaaaagtgagattcatcgcgatatttgacggaactggcatcccgcgagaaagtgccggatggcggcttatcaggcctgccgttgaacgatcgtgtaggcctgataaggcaggtatgccgccatccggcgagaaagcctgatggcgacgcgcgccttatttatagaggtcggcgctgatggtgatgttattaccgcgctcctgccactgacgcgtaatatgataatacttagcgcctttcttcgccgcgcgtttggcgacctgataggagatttctgtcatattgccgtagttgccggtgaacttaacgctgtcgaaaggcaccatcatcgcagccgtcgctttattcagctcctcaacttttgtgccatccggaagtgtgacagtgtaacgtccgcctttggaggattgcgtttcgaagaaacggcctacttcggcgctcggcgaggctgacgtggcgacgcctggaatttcgactttcttcgcagcttcgccgccctgagccagcgcggcgcggccagcttcagagtctgccggaatagcgtccgggctctggacgatgcgttttttcgcatcttgtttatagataaatgcagtgatgcgctggtttccgccctgattcgcatctatctgacgaacaatatagaaagcgtatgcgcctttttgtttcgccgctttcgtaatggcatcgttaacttccggctggctacggtagaagccctgaacggtgacggtgtcatacggttctaattgtacggcctggtctttcggtaattccacgatgccattaatgacacgatttttgggcgcgtcggctttcggcgcgtcggctttatacacgtccgccacaacacgccagttaccactgttgccgaactccgaggtgtcgacaacatagaaggaggctgcgccttctttatctgcgcggcgggacacggcggagaccgcatcgccaatagcattaaaacgaccggtaataacgatgcggtcataaggttttagtgcagccgcttgctccggcgtcagttctgttgctgcatggacagaaaaagcagccgcagaaagcagagccgacgccaggagagtgttcttaagcttcataaaaataatccttcgccttgcgcaaaccaggtactggtattgttattgactagaaacgtggctgattattgcatttaaaccatatggatgtctgcgggatttttcacgcatcgtgtcatgtatcctatctttgatgataacatttgccgatatgtcgaaaaaaacggcgtccgggcggctaagctaatgaagcgcataaatttaataagttaatttaatgttaatttcttgatcgcgccaggggtttaatgatgttttgctgtcaaatttgagcgaattatcagccctcgcaggccattttcaaggcattatggctgcttagcggctgaatcgttcatgttttgcaaatttgataaaaaattctgttttttggcgctagatcacaggcgttattttcagtaggttatagagagtttgtaacggttttattctgctggggtaacatttacctcaaacgcgggcaggcgtacgcttctcgcgcttactgacaaaccatcatcaaaaatatcgatggaagggaacatttatgcgaattggcataccaaaagagcggttacccaatgaaacccgtgtcgctgcgacgccgaaaacggtagagcagctactgaagctggggtttagcgtcgctatcgaaagcggggcgggtcaactggcaagttttgacgacaaagcgtttgcgcaggctggcgcggatattgtagacggcaatgctatctggcagtcggaaattattctcaaggttaatgcgcctgaagaagaggaaatcgctttactgaaccccggaactacgctggtcagttttatctggcctgcgcaaaatcctgggttaatggagaaacttgccgaacgtaaggttacggtgatggcgatggactccgtgccgcgtatttcccgcgcgcagtcgctcgacgcgttaagctcaatggcgaatatcgcgggttatcgcgccattgtagaggccgcgcatgaatttgggcgcttctttaccgggcaaatcaccgccgccgggaaagtgccgccggcgaaggtgatggtgattggcgcgggcgtagccggtcttgcggctatcggcgcggcaaacagcctgggggcgattgtccgcgcgtttgacactcgtcctgaagtcaaagagcaggtccagagtatgggggctgagttcctcgaactggattttaaagaggaagccggtagcggcgatggttacgccaaagtgatgtccgaggcgtttatcaaagcggaaatggcgctctttgccgcccaggccaaagaggtcgatatcatcgttaccaccgcgttgattccgggcaaaccagcgccgaagctgattacccgcgatatggtcgattctatgaaggccggcagcgtgattgtcgacctggccgcgcagaatggcggtaactgcgaatataccgtcgccaatcaggttgtgacgacggacaatggcgtgaaagtaattggctacaccgatctaccggggcgtttgccgacgcagtcatcccaactttatggcaccaacctggttaatctgctgaagctgctgtgcaaagagaaagacggcaatattgacgtggattttgacgatgtcgtgatccgtggcgtgacggtgattcgcgacggcgacattacctggcctgcgccgccaatccaggtttccgcgcagccacaggccgcgcctaaagcagcacctgcgccaaaagagccggaaaagcccacttcaccctggcggaagtatgcgttaatggcgctggcgatcattctttttggctggctggccgatgtcgcgccaaaagagttcctcggccattttaccgtgtttgcgctcgcctgcgtggttggttattacgtggtgtggaacgtgtctcatgcgcttcatacgccattaatgtcggtgaccaacgcaatttcagggattattgttgtcggggcattattgcaaattggtcagggcggctgggtcagcttcctgagctttatcgcggtgcttatcgccagcattaatattttcggtggcttcaccgtgactcagcgtatgctgaaaatgttccggaaaaactaaggggtaacacatgtctggaggattagttacagctgcatacattgttgccgcgatcctgtttattttcagtcttgccgggctttcaaagcatgaaacgtcccgccaggggaataacttcggtattgccgggatggcgatcgcgttgctggcgaccattttcgggccggataccggcaacgtggcatggattctggtcgccatgattattggcggcgcgattggcatccgcatggcgaaaaaagttgagatgaccgagatgccggagctggtcgcgattctgcacagtttcgtgggcctggcggcggtactggttggctttaacagctatctgtaccatgacgccagtctggcgccggtgctggtgaatattcatctgaccgaagtcttcctcggtatctttattggcgcagtcactttcactggatcgatcgtagcgtttggtaaactgcgcggcaaaatctcttctaagccgttgatgttgcctaaccgtcacaaaatgaacctggcggcgctggttgtttctttcctgttgctgctggtttttgttcgtaccgaaagcgtgggtctacaggttctggcgctactgctgatgaccattatcgcgctggcgtttggttggcatctggtcgcttctatcggcggggcggacatgccggtggttgtttcaatgctgaactcctattccggttgggctgccgcggcggctggcttcatgttgagcaacgatttgctgattgtgaccggcgcgctggtcggttcgtcaggcgcgatcctgtcttacattatgtgtaaagcgatgaaccgctctttcatcagcgttattgctggtgggttcggtactgacggctcctcaacgggcgacgatcaggaagctggcgaacatcgcgaaatcacggcggaagagaccgctgagatgctgaaaaactcccactccgtcattattacgccggggtatgggatggcggtagcgcaggcgcagtatccggtggcggaaatcaccgaaaaactgcgcgcgcgcgggatcaacgtgcgtttcggcattcatccggtggcgggtcgcctgccggggcatatgaacgtgctgttggcggaggcgaaagtgccttatgacatcgtgctggagatggacgagatcaatgatgatttcgccgataccgataccgtgctggtgattggcgcgaacgatacggtgaacccggcggcgcaagacgatccccgcagcccgatcgccggtatgccggttctcgaagtgtggaaagcacagaatgtcgtggtctttaagcgttcaatgaataccggttatgctggtgtgcagaacccgctgttctttaaagagaatacgcaaatgctgtttggcgatgccaaagccagcgtggatgcgattctgaaagcgctttaatcttttaaacgtgcggcggcctcttcggaggccgtttttatacacttcatcctttacgctgcctctttgttggctgcactcagaaaccccggtcacatcgttatctatgctcccggggatttcttcccttgccgccgcgatgcatcttgaatgattttgtgtatgtattgcattttatcttttgtttaaatcgctaagcagaacggcgatactctgcccgccggtggtctgttcgagggcgattttgacaatgatggttaacggaacggagagcaacatgcccaccggacctaataaccagccccagaaaattaacgacaaaaataccactaaggttgaaagacctaaaccacgtcccatgattcgtggctcaaggatattgccgaagaccagattaatcagcagatagcctgccagcaccagcagcgcatcataaaacccgttaaataccagcacctgaataatgggtggcagggcagcgagcaccgatccaatattaggaatatagttcagcgcgaaggccagtagaccccagacaaaggcgaagcggacatccagcgcggccagcattccccatgcgaccagccccgtcacgatactgatcgctgtttttaacaccagataatgggaaacgctatcaagcgcgcgttgaattgccgccataccttctaccgggcggctcatcatctgctgcagtttttcaggcagttgtggaacctccaacagcataaataccacggtcaatagcaataaaaagatggatgacatggcattggacagttgggtgagcaggttcgttaccagagtcatggcggcgtttggatcgatatatttcgccagctcatcaaccgacacgccaatgccagctcgctgcaaccacggttcaatacgttgcaacggtatcaccaatgaggagcgatattgcggtagggtacgagccagttcatttaatgatgtccccaaataggccagtagtagtaccattaacataacaataatcacaatgagcaatgatacggcgataacgcgcggaattcggcatcgggtcatccgttgcacaacgggattgagaacgactgcaataaataacgccaaaataaagggaacaatgatatctgcggcgaagcggataccgctcagaataactaccagcattcccagcataatgacgatttttagaccattgagcgtgatgatcggttttgccatatcagtccctgttttctgatgccgacacgaataataatgtgatgtcggtcgacctgttctggttaaaatcaaacacttcaggtaaagaagtgaaaatattttgagttaattcctggcttatgatacaaatcaggcgtgttcaactaccgaggacaattatcatccgcgatgacgagaagcaacactgcggataattgtaatattatggacaatatgttcagcgcttttttctccacgcaaacgcatcttcactctacctcctttttcctgcttatcggcgagcagcactggcgtaacgcactttagtctctcacttctgcctgagctggcgcaatgcgctgtgctaactgattttattttttagtttgctgcgtgcagcagactcgaaagagtatattctcatgcaggagaagtgtcatgttttactggattttattagctctggctatcgcgactgaaattaccggcacgctctcaatgaaatgggctagtgtgggtaatggcaatgcgggttttattttaatgctggtgatgatcacgctgtcatatatatttctttcttttgcggtaaaaaagattgccctgggtgtagcgtatgccttatgggaagggatcggcattttatttattaccatttttagcgtgctgctatttgatgaagcattatcaaccatgaagattgccggcttgctgacgctggtcgccggcatcgtattgatcaaatcagggacgcgtaaacccggcaaaccggtgaaggaggcgactcgtgcaacaatttgaatggatacacggcgcctggcttgggctggcaataatgctggaaatcgcggctaacgttctgttgaaattttcggacggctttcgccgtaaatgctatggcatcttatcgcttgccgctgttctggccgccttcagcgcgctttcccaggcggtaaaagggatagacctgtcggtggcgtatgcgctatggggcggttttggtattgccgctacgctggcggcgggctgggtgctcttcggccagcgcttaaatcccaaaggctgggttggcgtgatattgctgctcgccggaatggtcatgatcaaatttgcctgagacgatcgctgccggttggttcaggcagcgattcccgcattaatcctgcgccagagctttcagcttatcgcgaaagccggtgacggatatagcgcggttatcggcgcgccagcgatctttagccgcaggggcggagctttgtacgccaataagctgccatccgctatccgtgtgcaataagagcggcgagccgctgtcgccaggtaacgtgtcgcactggtgtgagagtacggcattctgcgcccagccggtcacgacgcaatcctgatgggaatagagcgcattcagatgatcttccggataaccggactgcgtgacttttcggtctgcggctttcaacgccgcagtgagcgccgctttatcgccggtaaataaaggcactggcgtgataccggaaggtgggtagcgcaatattaccagaccaaaatcccagcttgccgcggcaggcggcacaatccagccatcgccatccgctttcaggcgtcggcccagcgacggttcaacgcggccttcaatgccgtggatttcatagcgccatactccttttcgcgccacaaaacgcagcgcaaccgccttgtctggttttcctttcggtggcgttagcaggcagtgacctgctgtcagggcgatatgcggggagataagcgttgccgtacacaaattaccgctggcggtctctagttgcccgatggcatcccacggcgattgggtaggatcggcgacgggcacccgatcatcatggttaaaaaaaagcgttttaacgtcgctggcatccgtggcgtctgtttcagccccccggctttcgccataaccggtaaaaaacacactatgcccagtaatacagcaatggttttatgcatatcacactctggtgggtaattatgattattaacaacaaaccctcagtactactatagacgtgacggtaagaaagtgggagtaaaatcagataactacactcaggaaagatagaaatgcgtggcaataacggcgcataaaataagcacgataagaatgagctcaaagcggtagcgagacacttttttgccctcccggaaggcggcgctaaaccagaacaatttagcgccgtaaaaacgggcgcgggggcgcgccgcagcatgttacgacttacgcagccggttgagtagttggttttgacgtggttttggctggcgctttaccaccttttttctggtgctttttagccgcctgcgctttttgctcaacggttttcttatgctgttttttgtggtgctgggtggtctgggttgttttggcaggcgctgcggttttcgcaggcgttgcagtctcagccgcgaatgctgcggaagagagacccattgcagcggcaacaaccagagctaatacttttttcattttgataccctcgatttggttttcattcaaccccactgcggggccggtgaaatgactatatcgctgttatcaaaaggcttccgtgagtgattggtttcggcatgtaacgttatgtacaatcccccggtaacgcgatgtcagcccccaccataataggtagctttacgttaccggccgttatttttggtcgcagagtcggtaatatccgccatccagaataacaggcacaccgtatatgaatccgataatctgggtggtatttacgcttctggcgctggatgcaatcagagaagttatgggcgtatcaagcttgacaggtctgtggtgaacagtgagtcgtggcgtgaaaccagcccggcgatagcgcacgttgctatcgccggattatttcttttcaggcgtgaagacgatgatgtaaccgcgtcccgaccaggatggccagcaccagcattagcgcgataaaaccacctacgccgttccagccgtaactatgccagaatacgccgcctagcgtcccggcaatactggaccccagataatagctgaaaagataaagtgacgaggcctgtcccttcgcccggcgcgcacgcgggccaatccaactactggccacggagtgcgcggcgaaaaagccggcggaaaaaagcagcatcccggcaaaaatcagccaaagcgaggtaaaaagcgtcagtaaaagcccacccagcattactgcggtagagaacagcatcaccggcccccggccatagcgtgaggtcattgcgccagctttcggcgagctccatgtgccggtgagataggctacggataacagtccgaccacggcctggcttaattcccagggggagagcatcaggcgatagccaatgtagttaaacagggtgacgaacgcgcccatcagtaaaaagccttccgcaaacagcagaggtaaccctcgatcgcgccagtggagacgaaaattaataaatagcgttttaggccgtagcgacgtgggacggaaatgttgcgaggcgggtaaaatcttccagaacatcagcgcggacgccagcgcaaagcatccgatggccgccagcgcgatgcgccagttaaaaaagtcggtcatgacgccgcttaataaacgtccgctcattccgccgatggaattaccgctaatgtagagccccatagagaaagcgacaaagctgggatggatttcttcgctcaggtaggtcattcccaccgcggcgacgccgcttaacgacagaccgatcagcgcgcgcataatcagaataccatgccagctggtcatcatggttgataacaatgtgcagcaggaggctaataacaaggcggtgaccatcaccggtttacggcctatcgcatcagaaagcgggccggtaaaaagtaagccgatagccagcatggcggtagaaatagaaagtgaaacgctgctgctggcgggggagacgccaaactcctgggaaagtaccggtagtataggctgaacgcaataaaggagcgcaaaagtcgccaggcccgcggaaaaaagggccagcgtgacgcgcatgaaaggcgctgtaccgcgtttaataaattgaaccggctgagaatggcgttgttcatcgatatcgctcgccgtggcgtcatcgagaatagttgtacgactcacgttaaatccttgctttacatctccgtcaacaggagacgggtataaccgacatgtaaagcatagaaaaagcaaaatattctgtctaatatattaattgtctcaaataagacgttaaaaatatgaatatcgaattacgtcatttacgttactttgtggcggtagcagaagagctgcattttggtcgcgccgccgcgcgcctcaatatctcgcagccgccgctgagtcagcagatacaaattctggagcagcaggtcggcgcgcgattactggcgcggaccaaccgcagcgtagcgttaaccgccgccgggcgacagtttctggtggatagccgacacatcctgagtctggtaaacgacgccgccgctcgcgccgagcggttgcatcagggcgaagcgggtgaaatccgtattggctttacgtcttcagcgccttttattcgggcggtatcgcataccttttcgctgttccgccagtcctatccgggagtgcatatgcaaacgcgtgaaatgaatacgcgtgagcaaatcgcgccgctcaacgaaggcgtactggatattggcttgctgcggaatacgccgctgcccgacacacttaatcgcgaggtgattttgcatgagccgcttatggccatgatcccgcgcgaacatcggctggcgcaaaagccggtcgtcagtctgacagaactggcggaagaacctttcgtctttttcgacccacatgtcgggacgggcctctacgacgatattctcggcctgatgcggcgctataacctgtcgccgaccatcacgcaggaggttggcgaggcaatgaccattatcggtctggtggcggcggggctgggcgtctcgattctgccggcatcctttaagcgtgtacagatgagcgagatgcgctgggttcccctggcagaagaggacgccgtatctgaaatgtggctggtatggccaaagcatcatgaacagagtcatgccgtacagcggttttgccaactgctattactggctgcccgacgggattaattacgcttaaaaagggtgaaaatgtgcagttaatcacacggctaagcaaaaagttgacggcgagtattgaagtgtttcaccatagcacacagattatttcggagcgcgaaaataaagggagtgagcggtggttgctgatagtcagcctgggcatatcgatcaaattaagcagaccaatgctggcgcagtgtatcgcctgattgatcagctcggaccggtatcgcgaattgacctgtctcgtctggcgcagttggcgcctgccagtattacgaaaattgttcgcgaaatgctggaagcgcatttggttcaggaacttgaaattaaagaggcgggcagtcgtggacgtcccgccgtcgggctgatggtggaaacggaagcctggcactatttatctattcgtattagccgtggcgaaattttccttgcactgcgcgatcttagcagcaaactggtggtagaagagtgtctgccgctgccgttaaccgaagccacgccgttgcttgagcgaattattacgcacgttgatcggttttttacccgccatcagcagaaactggagcgtctgacatccattgccattacgttaccgggcattatcgataccgaaaacggcgttgtgcaccggatgccgtattacgaagatgtcaaagagatgcctttgggagattcgctggagcggcacactggcgtaccggtttacattcagcatgatattagcgcctggacgatggcagaggcgctttttggcgcttcacgcggcgcgcgcgacgttatccaggtggtgattgatcataatgtgggggcgggcgttatcaccgacggtcatttgcttcatgcgggtagtagcagtctggtagagattgggcatacccaggtcgatccttatggtaagcgctgttattgcggtaatcatggctgtctggagaccatcgccagcgtcgatagcgtgctggaacttacgcagcttcggcttaatcagtcgatgagttcaatgttgcacggccagccgttaacggtagattcactgtgtcaggcggcgatgcagggagatctattagcaaaagatattattagcggcgttggcgcgcatgtcggacgcattctggctatcatggtgaatttatttaatccgcaaaaaattcttattggttcgccgctaagtaaagcggctgatatcctttttccggccattgctgacagtatccgtcaacaggcgctgcccgcctacagcaggaatacggttgtggaaagcacgcagtttaccaaccagggcacgatggccggggcggcgttggtaaaagacgcgatgtataacggctctttgttgattcgtctattacagggttaacattttttaactgttgtacaaaaatttgcgctaactcaagctgattgcccttgccatatcttagactttctccactgtattattttcctggcttatattttcgaagcataacggtggagttagtgatgctgaagcgtttctttattacaggtacagacacttctgttgggaagacggtggtttcccgcgcattactacaagcgttagcgtcgagtggtaagagcgttgcagggtataaacctgtcgctaaagggagcaaagagactgcagaagggatgcgcaacaaagatgcgctggtattgcaaagcgtctcttcgctggagttgccgtatgaggcgattaatccgatcgcgttaagcgaagaagaaagcagcgtcgcgcatagctgtcctataaattacaccttgctgtccaacggtctggcgagcctgagcgataaagtggaccacgtggttgtggagggtactggcggctggcgtagtttgatgaatgatttacgtccattgtctgaatgggtggtacaggaacagttaccggtattgatggtggtagggattcaggaggggtgcattaatcatgcgctactgactgcgcaagctgtcgctaatgatggactgcccttaattggctgggtggcgaatcgtatcaatcctggcctggcgcattatgctgaaattattgatgtgcttgggaaaaaactgccagcgccgctgattggcgagctaccgtacctgccgcgcgccgagcagcgtgagctggggcagtatattcgtttgtcaatgctcggcagcgtgctggcggtagatagaatcatggcgtaacgttcgcgagagcactgacgcgactacacaggcaatcagcagaccggggagtaactgatactcgccggtcatttcacaaatcatcagggtggacattatcggcgcatgggttgtcgccgccagtagcgtcgccatacccgccagccccaataaaatcgctatttcatccgagcctggcagccagaatccccatatccgacccagaaacattccaatggataatccgacaaataatgttggcgtaaagacgccgcccggcgcgccagacccgctgctggcgagcaccgccaggattttgcacacaaaaattccgccaatcagcgagaatagcggcggggagagcaaaaatgattgtacgacgctatagccgtttccccataccgtgggcgtgagtaacgacagtaatccgacaataagcccgcccaacgccagttgccagggcggggacagttttaaacgtaagaaactattatggctggccgtcatcagccacatcagcaatgggccgcacagaccggcgaccaggccggtactgactatcatgacgtactcccgcgcgtggagatcaacggtcagatgtacggtatagagtagtgaatcgctaccgtttaatacatgggtggttagcagggcgacgacggcggaaacgacaaccgggccgagggaagccagcattaaggtaccgaacaggatctccgcgataaacagactgcccgccagcggcgcatggtaagcgcccgccatgcccgcagcggcgccgctggcgatccataatttccattcctcacgcggcgtgaagcgtcgggcaaagctggacgccgccagcgcggcgaggaggatcattgcgccttcgcgaccaattgcgctgccgctgaccacgaccagcagcgaggccagcgatttcaccagactggcgccaacgtcaaattgcccgtcggtttgcaatgcttccatatagtcagtgggcgcatgggggcgctgttggttcattttttgccacccccacagcaacagaccagcggccaggccgccaagcgccggcgtaatcagccgtcgccagggcgaaagcccctcagccgcattcaccagactgccggtgtcattactcaggaaaatccactccagcaattgcatcgcatgacggaaggcggcgacagccagcgccgcgagaataccgatgagcgtagcgatcagcaggcgacgaaacatcgcgcgcagatccgggtaagcgtgtaaacgatgcatgagcgggtaaacagggagtttcaggatagcctattctgcggggaaatggcgtcagacgcaaaagcactatgtgcgatataatattgcgtacaataatgatactgccggatagcgagaggctatccggcggcaacgttagctgttttcgtgaatatttagcgcccgacgcgtgcggcctgagctgagatagtcggcgatgtaatcctgagagatttcaccgttatagcgtccgtcttcatcaacgatcggcatccagctggtattactttcgtacaatctggacagcacaatacgcaggttatcttccgctttgcccgtaatacggaaaggatgggtgatatcggcgcagattccgctggcgttccgcgcttcccggcgcttcacaaatcccagtggcttaccgtcgttgtcaatgacggtaatggcgcgaatatcgtgatcatccataatgccgaacgcctcgcttaacggcgtggaaggccgcgcggtaatggttggctgttggtcggtcacatcgcctgcggagaccagtagcaaacgctttaacgttctgtcctgaccgacaaacgacccgacaaactcgttagccggtttggccagcagttcatcaggactggcgcactgtacaattcgcccctgacggaacacggcgatacggtcgccgagctttagcgcttcgtcgatatcatggctgaccagcatcacggtcttttttagcttacgctgcatatccagaaactggttctggatcacttcgcggttaatggggtccaccgcgccgaagggctcatccatcagcagtaccggcggatcggcggccagagcgcggatcacgccaatacgctgttgctgtcccccggacatctcctttggatagcgatgcagaaattttctggcatccagcgccaccatgtccatcaactcttcggcgcgttgcttgcagcgtgctttgtcccaacccaacatgcgcggcacaacggtaatattttcttcaatcgtcatattaggaaacaggccgatttgttggataacatacccaatattgcggcgtagcgttaccgcatccatatcgttggtattctcgccgttgataagaatattaccgctgctgggcgcgatcagccggttgatcatctttaacgtggtggttttgccgcagccggagggaccgagtaagacgcacatttcgccttccggcacgttcaggttgacgttgtcgacggcttttagcggctgaccctttttctgtacaaattgtttggtgagattttccagttttatcattatcgtatccccttcggtgtcagtacgacttgcagacgatgcaacagccagtcaagtacaattgccagtagacagatcatcagcgcgccggcaattaacatgcgaatatcactgccgctaatgccgtttaacagtagcagccccagaccgccggcgccgatcaccgcggcaatcgccatcacgccgatattcatcactaccgcggtgcggatacccccgaaaataaccggtagggccattgggatttcgacccagcgcagccgttgccagaaagtcataccgatgccgcgtcccgcttcacgcagaccgggcggcaaactatcaagcgcagtatgggtattacggacaatcggcagtaaagagtagagaaaaacggccgtcacggcgggcagaacgccaataccatgtccgatcagcgaaaagagcgggatcattaatccaaacagcgcgatagacggaatggtaagaagtagcgtggcggcgcccaataccggcgttgccagccatttgtggcgtacaatcaaaacgcctaacggtacgccgatgataatcgccagaccgacggccagcgcgaccagccagagatgctgaaaggtaaggctggcgagatagcctgcgttatccagcatataatgtatcgtatccatagtcgctccttacagcagacctttgtcctgcaaaaattgatgggctacctgttgcggcgtgcgatgctcgatatcgacctgagcgtttagggtcgatatcacatcgttattgagcaggccggaaagggtgtttaaggcgtcatcaaggccaggattggcttccagcacctctttacgcaccacgggcgtgacagcgtaacttggaaagaagcctttatcatcttccagcactttcagatcaaaccctttcacccgtccgtcggtggtatagaccagcccggcgtcaaccagcccatcccgaacggcgttatagaccagccctgggtccatctgtcgtatttgcgggcgatcgagctgcatctggtaggcttgctgaaggggcttcattccgtcgctgcgcccggcaaattccagatcgaggccgagcatccagttgtggtcaggatcgttctgccggacctgttcgatttttgccaccatttgcgagatggtggtgatattttccgactcggcgcgtttgcgctgcatcgcgaacgcgtaagtattgttcatgtcagccggtttgagccataccaggcccagcttcgcatccaggcgttttaccgtgtcgtaggtttcctgtggactcatgcgcttatcgatacggttgaaaataatcagcgatgtaccggtgtattcccaggtaatatcaatttgtttattcaccatcgcattacgtgaaatcaccgcggcgatattggtttgcggctgaacctgaaagcctttcttctgcaaatactgaacggtcatagcggaaagaatatgctgttcggtaaagcttttggtggcgagaaccagcggcgcggcctgcgtctggctactgaacaacagcgttgcggcaagccatcccaacaggtgttttttgaatctcatttaacgctccttattgttatttatgcgttcagacggtatgagggctaaggcgtcgcccaaaccaggcaagcagagtgtcaagaatcagcgcgaataacgccgtggccgttgcgccgaggatcaacgtcggaaaatcgttgagataaattcccgggaaaatcagctcgccgtagctgctggcgccgatcagaaaggccagcggcgcggtgccgacattgatggcggtcgcgatgcgaataccggacagcatcactggccacgcattaggtagctctacctggcgaagccgctgccattttgtcatcccaatcccgttcgccgcttcaatcagtgaggcgggaacggaacagaggcccgcataggtattgcggacgataggcagaagggaggccagaaatagcgcgacaatggcgggcgtatcgccgatcccgataatcaccatcgctaaggccagaacggccagcggcggcaaggtattaccaacattaaagatttgcatgacatattcagcaaatccttttgccgcaggtcggctgagtaaaatcccgctcgggataccgaccagtaaagcaaaaaacatggacgtaaagaccagcatcaaatgccgttgtccgagatacagcagatcgacctgacgcgctttcagcgtctccagaccgattccccagataaacagcgccagtaacagcaaaatgacgatagtgaacccaagtacacgttttagggtgagggtgtgcattgcggtgtgtctccctgtttgcatgtgttatggcgacgttaagagtcgcgtgttgttatgccatgttccggcagggtgctttgagctatagcaacaggttgggaaggattccagcgaagcgtgatgtttaacactattaaacatctattaacaattatgctttgcccttatgcggcttagggtgaacattcacgataaagaattatcttaaaaatagaagcgcggtgtgacgttgtcactttttgtagataaaaataggccgcaatgagagaaaaggcaggtaaaatcctgccttttgtggggattaacggaataacggttttacagcgacgggaataatgagttgagcttgccattgcgccagcgtcagacgcgccagttgccccaacgcctgataaaacggatgcccggcatgatcgataaatacgtccagaaagcgggacgaccacggaaacagatgccaggccaggagttgttcgcattcatgatgacggtcgttctcggcaagccaggccgccagtagcaacagcgacccaaaatgatcttctggctcgttttgctgcatttcaaactgaattccgttttcgcgcatccactgacgtagcgccaatgtagaatcgccaaataatacgctctcacgatccagccagacggaaccccacggcggagacggcagagcgtaagggccgataaacagacgctgccaggcctgtggcaacgactcttcgctgtgggtcttaaacatagccgccacaggcgcaagcgcctcggcatcaagcggccactgcgcctgccagtcgtcgtttaatagcgcctggaccagaggagcggtttcgtggctttccggcgaataataaaacaacgcgccaagaacacgcgccgttactgcaaaatcatcacgttgtaaaaaagtggtcattcaaacaatcccgaaaggtgcgggtcgccccgcacgcataaattaacctgcgacggccatacctacggtcatatgcaggccataaaaaagtccgcggccaataatttcgcctgccagcaccagcacgacaccgagcagcaaaccaacggtatgcggttcgcggcgacggattagcggacatagccagcagcctaatccggcagcaagcaagacaatgcgccagacctgtagcataccgtaatccggtgcgagatggctggcctgttgcacggaactgtgaatggttgagagagacagtccttgtagtacgatgaccgtcacgcacaccaccaatgccaggccgctaatactggcaaacgtcacgctgcaaaatgggacgcgcgcgatgcgtagcagtaacgccgcaaacaccgggccgcacaggaatgccgtgaggaaaaaggccagcgtggtgtagccattataccaggttggcacggtatctatctgataaacgagcgtcattgcccagatgaatgcaacgccgagcgccatactgaccagcagccacactttacccagcgccgggggcattttaccgagtaccgccaccagccaccagatgccgcctacggcaaagaacaccgatcctgcggcgatttcattactcagtgcggaagcgcctacgcggttaagcgagttaaacgcgcgcatcggcgagccgagatgcataatcgacgcgaggaatcccagtcccatcaccagccacagaaaaaacatgctgcgcacgatgcgctgacgggcgatggtatcgtcttttgccgtcagccagcccagtccgctaacgattaacgcgccgaccacgcactgaccaaagaccgtgaagatcatcaacggccattcatgccatccacttcccatcttatacctccttcggattggccagataaccggtagtgtccccggtcgggcggctgttggcgttgggtttaatcacaatattcggcttcgtgaaatgcgcgcgcggcaacggcgcgacggcagccagctcaccgtgttttttacgcagttcgtctatcgggccaaagtccagtgcccgcagcgggcaggactccacgcaaatcggtttcttgccgtcagcgacacggtcataacagccgtcgcacttggtcatatgacctttggccgcgttgtactgcggcgcgccgtacgggcaggccatgtggcagtagcggcagccgatacagacctcttcgttcaccaccacaaaaccgtcatcgcgcttgtgcatcgcgccgctcgggcagactttggtacaggccgggtcttcgcagtggttgcatgaaatggagagataataggcaaagacgttctggtgccagacgccgttatcttcctgccagtcaccgcccgcatactcataaatgcggcggaagctgacgtcgggagtgagatctttgtagtccttgcaggccagttcgcaggttttgcaaccggtgcaacgactggaatcaataaaaaatccatactgggttgtcatcggttactccttacgccttttcaacctgaacaagattactgtgtgacggattacctttcgccagtggggaaggccggtgcgacgtcagaatgttaatggagccgccgcgatcgactttgtcgccaaacatgtcggcatttaaccaggcgccctggccgatagcggtgacgccgggcaatatgcgcggcgtgacttttgccggaatgagcatctctccattctggttaaagacccgcacggtgtcgccatgctgaatgccgcgcgcttgcgcatcaatcgggttgatccagatctcctgcggacacgcctgttgcaggatgtcgatattgccgtagctggagtgggtacgcgctttatagtggaagccggttagctgtagcgggtagcgctgacgaagcggatcgtcccaaccgtcaaagcctggcgtataggcgggtaaaggatggataatctcatctttcttcagctcccacgtgttggcgagggttgccagacgctcggaatagatttcgattttaccggacggcgttttcagtgggttggcggcagggtcttcgcggaaggcgcggaaagcgacgtagtgctcctccgggcattttttcttgaaaatccctgtctgtttcatctcttcgtaatccggcatttccgggttacgcgctttggtttttgcgtgcaggtatttgacccactcatgctgcgtgcggccttctgtgaaggtctggtatacgtccggaccaagccgtttagccacttcactgagcgtccagtaaatgggctttctttcaaatttcggcgaggtggcgggctgaccaagaatgacatagcccatattgcctgcggattcgtgggaaatcagatcttcctgctcggtcggcattaaatcaggcagcagaatgtcgcaatattttgccgacgcggtcataaagtgctcgatgccgacgatcatttcacatttactgtcgtcctgaagcacctcgtgggtgtgggcgatgtcgccatgctgattgatcagcgtattactggcgtagcaccacaaaaatttgatcggcacgtcgagcttgtcttttccccgcacgccgtcgcgtgtggcggtcatttccgcgccatgatcgatagcgtcggtccaggtaaagaccgaaatctgggtttttaccgggttctccagcatagaaaaccattcgacgcccagatcccaggtgccttcgcgcacgccggaattaccgccatttatgccgacgttaccggtgagtacagacagcatggcgattgcgcgtgcggtctgctccccgttagagtggcgttgcggtccccagccctggcaaatgtaagccggtttcgccgagccgatttcccgcgccagttgaatgattttttccgccggaatactggtaatctgcgcggcccattgcggcgttttagcaataccgtcgtcgccctgacccaaaatataggctttatagtgcgcgttacgcggggccgaggcgggcagagtggtttcgtcgtagccgatgcagtatttatccagaaacggtttatcaataagatcttcggtaatcagcacccaggcgattgccgccgccagcgcgccatcggtacctgggcgaatcggcagccactcgtcttctcggccagcggcagtgtcgttataacgcgggtcaatgacgatcatccgggcgttggagcgctcgcgcgcctgttcgacatagtatgtcacgccgccgccgctcatacgtgtttccgcgggattattgccaaacatcaccaccagttttgtattggcgatatcatccggactgttgccgtcattgccgccgaacatatagctcatggccgcgctgatttgggcggtgctgtagctaccgtaacggctgagatagccgccgcaggcgttcatcaggcgatacggtacgttagaattggtaatattgccgccgtccacgccggtaccgtaaagcacatgtaccgcttcgttgccgtagtccttgaggatacgtttcaggttatcgccgatggtatccaacgcttcatcccaactgatacgttcgaatttgccttctcctcgtttaccaacgcgtttcatcggatatttcaggcgatcgggatgattcatccggcgacgaatagaacggccgcgcaggcaggcgcgtacctgatggttgccatattcatcgttgcccgtggtatctgattcaacccaatatacggtgtcatcttttacgtgcaggcgcagcaggcagcggctgccgcagttaacggtacatgaactccagaccgctttttctgccacattgccggatgcgaggtctgctgcggcgtgtgcgatgcgggagaacggaagggtgaaagcgctactggcaagcgcaaggctaccgatagcggaggttttcaccaggcttcgtcggctgagactggccgccattaatgcctcagggttggtgattttcataacagctcactatgctcatccaaaaaagagttttaaatgtcgttgtgttcgcaaaacggggagctccgggcgcgtaaaaacgtcccggagcaggcggcttagattttttcgatttccaccagatttgtatgttgaggattcccttttgccaggggggaaggacgcagcgtcgtgagcgtattgatgcaggcgccgtggtcaattttatcgccagccatatccgcattatgccatgcgccctgacccatcgcgctgacgcccggcagaatacgcggcgtgactttggcgggtagacgcacctctccacgatcgttaaagacgcgaaccttatcgccattcgcgataccgcgtttttgcgcatcgagcggatttatccacacctcctggcgacaggcggcctgcagaacatcaatattgccgtagcttgaatgggtacgggatttatagtgaaagccaaacagctgtagcgggaaggtgctccgcttcggatcgtcccatccttcaaaagtaggggtataaatcggcagtgggcttatcacgtcgccttccgccagctcccaggtactggcgatgtgagcgagtttgcttgagtagatttcgattttaccggacggcgtttttaacggattggcctgcggatcttcacgaaattttttataggcgacaaagtggccgttgggatctttgcgtttatagatgcccatttttttcagatcgtcatacgcgggcaatgccggatctcttgcctgcattttggcgtacagatattgcagccattgcgcctgtgtacggccttcggtaaaccgctgatacacatcgtcgccgaggcgtctggcgatttcgctgagtacccagtagatgggcttgcgctcgaacttaggcgtcgtcgccggttggataaaaatcagatatcccatattgccggcgtaatcattggggatgatatcctcctgttcgacggtcatgagatccggcagtaaaatatcagcgtacttcgcggaagaggtcataaagttgtcgatgaccacaatcatttcgcatttcgcttcatcctgaagaatttcatgggttttattaatatccgaatgctgattaatcagggtgttgccagcgtagttccatagaaatttgatcgggacatccagcttatctttgccgcgtacgccgtcgcgcagggcggtcatttccgggccgcgcgcaatggcgtccgtccagctaaagcaggagatggcggttttaacgggattctccaggaccggcagacgttcaatggtaatggtgtaagtggattcgcgtgcgccgctattaccgccatgaatgccgacgttgccggtcagaatcggtaacatggcgatggcgcgagcggtttgttcgccgttcgcctgacgctgcgggccccaaccctgacagatgtaggccggcttgacgctgcctatctcgcgcgccagtttgataatccgatcggcggggatgccggtaatatgcgatgcccactgcggcgttttggcgataccgtcctcgccctgacccaaaatataagccttataatggccattggggggcgcgtcagccggaagggtcttttcatcgtagccgatgcaatagttatcgagaaaaggctggtcaacgagattttcgttaatcaatacccaggcaattcccgccaccagcgcggcatcggtgccggggcgaatcggtatccactcgtcttcacgtccggcagcggtatcggtatagcgcggatctattacgatcatgcgcgcatttgagcgttcacgcgcttgctccagaaaccaggtaatgccgccgccgctcatgcgtgtttcagccggattattgccgaacatgaccaccagtttactgttttcgatatcagatgtgctgttgccgtcgttggaaccataggtgtagggcatggcgcaagaaatttgcgcggtactgtatgagccgtattgattcaacgaaccgccgtagcagttcatcaaacgcttcaccggcgaggcggcaggcgacgagcgggttatgttgccgcctacgatgccggatgaatagtggatataaacggcttcattgccgtaggtctctacggtctttttcaggctggcgctaatggtgtccagtgcttcctgccagctaatgcgttcaaatttgccttcgccgcggcggccaacgcgtttcatgggatagttaaggcgatccggatggttaatacgccgacggattgaacggccccgcaggcaggcgcgaacctgatgattgccgtagacatcgtcgccagtgttatcagtttcaacccaccagacttcattatcttttacatgcagacgcagggcgcagcgactgccgcagttgaccgaacaggcgccccagacgattttatcttcttcgttgcgcatagcctgctgcaccgccgcggccgcggtacgcatcccaaacggtaaagatacgcctccggcagccagcgccagtgagccaagcgccgctgatttcactaacgtcctgcggctaacgcctgtttgttgcttttctccgggcatcactcactccattgtcgttattatttcgctatatattgataactataacgaaattattaacatgctaatgatgtaatgagtttacccctttgggagtaaggattattaatccatgtcaaagagcgttaccctccggacccggagggcaggaggaggttattgcggttcggcggatgaaccgtcctgagcgggagaggtattggctggcgcattgccgctgctggtgcgggtataaagaattttatgcgtgtcgttcgcgcaatggcccaccacctgtgagtccggctgatcggcctggtcgttaggaacgatagtgagcgtaaaattatccgccggcacgccgttattgatgatacgttgttcaatatcgctttttactctctcgcacgatcccggtgccgccatcaccagcgagggggcgctaactaacgccagagcggctattgcagttgcgattttcatcatgaactcctgtgattaatgacgatgttctaagcttagcatttttcgtgtaaataactgtatttgctaatatgatgataaatatcttttcatcctggtgatacgtgtgaagaaaccccttttactgacgttattgtgcatgatactggcaggttgtgataacccgaaatcccttgagtcttttacgccggaaatggccagtttttcgaacgaatttgattttgatccattacgtggtccggtaaaggatttcagccagacattgatgagtgagaatggcgaagtggcgaagcaggtcaccggtacgctttcacaggaaggctgttttgatacgcttgagttacacgatctggagaataatacggggctggcactcgtgctggatgccaattattaccgggatgctcagacgctggaaaaaaaggtgcagttacaggggaagtgccagctggcggcgttgccttcggcgggcgtgacctgggaaacggacgacaacggttttgtggtatcggcgacgggcaaagagatgaaggtcgagtaccgctatgatagcgaaggctatccgttaggtaagacaaccataaactcgcagaatacgctctctgtgacggcaaaaccctccgcggacccgcgtaaaaagctggattatacggcagtcagccgggtggatgatcgacaggtcggcaacgtcacacagagctgcgaatatgatgcgtacgcgaaccctgttgactgccggcttgttatcgtcgatgagagcgttaagccggcagtgtcccaccattacaccattaaaaatcgtatcgattactactaaaccgggcgcggtgcgactctccgtgactaccgcgccgcgcttactgcgcggtgggtttcaggagtgtagaaccggacgttttatgttcatccagatactgctgctggaagatacacatgcggatggtgttacggtattcgccgttaatgaagaactcatgaatcagctcgccttctactctaaacccgagtttacggtagatgtgaatcgctttttcattctctttatcgacgatcaaatacaatttatagagattgagtacggtaaatccgtaatccatcgccagtttggccgcgcgtgacgccaggccttttccctggtactccggcgagataataatctgaaattccgcccgccgatgcacatggttaatttccaccagttctaccagcccggcgttttcaccgtcgcattcgacgacaaagcgccgttcgctttggtcgtggatgtgtttgtcgtagagatccgacagttcgacaaaagcctcatacggctcttcaaaccagtaacgcataacgctggcattattatcaagctggtggacaaatcgtaaatcttcacgctcaagcgggcgcagtctgaccttgtagtcacttgtcatactgtatccttacacttccttttagttatcctgcatcagggcgtaataacgcgacctgtacgacgatccagacaccgcagcgtattgggctcccaataggcgttgatgttggcgctttgctcgcatttatcgcggttatcaaaggcggcatcggctttgtcccactctttttctgcgcgggtattcactttctgacgcagactgcgagtgtcgttccattgttccttttccatcgccgcttcctgacgactttgtgcgctatctcccgattcaatcaccagtttactggtttcagcgaatgcggaagtagtatatacaacggccgccaacgtaagcattgccgtcaggcacaggcgtttgctcagcgtattgttcatcacaacatcctttcattagaggggaaaaagcggtaaaccacctgtaaattctacaccaatccttatgcctggcatatacacaagaatggccggataaccgtaacgatattctgttgtattatcacttatcatttcgtaaccaaatgaatctcatgctaaagacgactctgcttttctttgtcaccgccctctgtgaaatcattggatgttttcttccctggctatggcttaagcgcggcgccagcgtgtggtggcttctgcccgccgctgcgtcacttgcgttattcgtctggcttttgaccttgcatccggcggcgagtgggcgggtttatgcggcttacggtggggtatatgtctgtactgcgctcctgtggttacgtgttgtcgatggcgtccggctcacggtttatgactggtgcggcgcgctgatcgcgctgtgtggaatgctgattatcgtcgtcggatggggacgtacgtaacattgccgcgcgaccagaacattttgtgatctggcagcgctttttacatcaatatacttgtatggtagtagctcagttgggtaaatttcctgcatcccataatgcgatgtaaggaataaaaatgaagattgtaggggctgaagtttttgttacgtgtccagggcgtaacttcgtcaccttaaagataaccacggaagacgggatcaccggtctgggggatgccaccctgaacggacgcgagctcccggtggcctcgtaccttaccgatcacctgtgcccacagctcatcgggcgggatgctcgccgcatcgaagatatttggcagttcttctacaaaggcgcgtactggcgccgtggccctgtcaccatgtccgccatttccgcggttgatatggcgctatgggatattaaagccaaagccgccaatatgccgttgtatcagttactcggcggcgcttcgcgtgaaggcgtcatggtgtattgccataccacaggccacaccatcgacgatgtgctggaagactacgcgcgtcataaagagcaagggttcaaagcaatccgcgtgcagtgcggcgttccggggatgaaaaccacctacggcatggcgaaaggcaaggggctggcctatgagcccgcgacaaaaggccagtggccggaagaacaattgtggtcaacggaaaagtatctcgattttacgccaaagctgtttgacgccgtgcgtaatacgttcgggtttaatgaacatcttctgcacgatatgcatcaccgactgacgcctattgaggctgcccgctttggcaaatgtattgaagactatcgtttgttctggatggaagacccgacgccggctgaaaatcaggcgtgcttccgcctcatccgccagcatacggtcacgccgattgccgtaggcgaagtctttaacagtatctgggattgcaaacagctcattgaagagcaattgattgactatatccgcaccacgcttacccatgccggtggtattaccgggatgcgccgcattgctgattttgcctcgctctaccaggtgcgtaccggttcgcatgggccgtccgatctgtcgccggtttgtatggccgctgcattacatttcgacctgtgggtgcctaactttggtgtgcaggagtttatgggctactccgaacagatgctggaggttttcccgcataactggacgttcgagggcggctatatgcatccgggcgacaagccaggactgggcattgagttcgatgaaaaactggcggcgaaatatccttacgatccagcctatttgccggtggctcgcctggaagacggcacactgtggaactggtaaggagcgaaaaatgaaaagcatcgtaatcgaaaaaccgaatacattaactatcgaaacgcgcgcgcttccgcagcctgcgccgggcgaagttcgtattaaagtgaaactggcgggtatctgcggttccgacagtcatatttatcggggacataatccctttgcaaaatatccccgtgtcataggccatgaatttttcggtgtcatcgacgcggtaggcgacaacgtcaatcacgaccggataggagaacgggtatccgtcgatccggtgatcagttgcgggcattgttacccttgttcagtcggtaaacccaatgtgtgtacctcgctggtggtgctgggcgtgcatcgtgacggcggtttcagcgagtatgcggtggcgccggcccgtaatgctcatcgcataccggacaacatcgcagatcatcatgccgtcatggttgagccgtttaccattgcggcaaatgtgacgggacaagtgaatccgaccgagcaggacgtggcgcttatctatggcgcaggcccgatgggactgacgaccgtacaggcgctgaagggggtttatcaggttaaaacggtcatagtcgttgatcgcattgaagagcgtttagcgatggcgaagcagagcggcgctgactggaccctcaataatggtcaacattcactggcggaatttctacagcagaaggcgctaaagccgaccttgattgtcgatgccgcctgtcatcccgctatcctgcaagaggcgattacccttgcatcgcctgcggcacgcattgtcctgatgggattttccagcgacccgtgtgagattgtacagcagggtattaccggaaaagagctggctatttattcatcgcgtcttaatgccaataaattcccggtcgtgattgactggctgaataaagggcttattgatccggataagctgataacgcatacatttgattatcaacatgtcaccgacgcgattgagcttttcgagaaagaccagcgtcaatgctgcaaagtcttactcacgtttgcgaaataatataaatacttgcgagtaagtggtacgcatcttacctcttagagattgcctatatgacacaaataaagcatgaacgatcgactcaggatttagtgcgcgctgccgtatctggctggttaggcaccgcgcttgaatttatggattttcagttatattcactaggcgcggctctggtcttccatgagatatttttcccggaacagtctgccgcgatggcgcttattctggcaatgggcacctatggtgcaggttatatagccagaattatcggcgcctttgtttttggtaaaatgggcgaccgcatcggacgaaaaaaagtattgtttattaccatcaccatgatggggatctgcaccacgctgattggcgtactgccgacgtatgcgcaaatcggcatttttgcgccagtattactggtaacattgcgaattatacaggggctgggcgccggggcggaaatttccggcgcgggtaccatgctggccgagtatgcgccgaaaggaaagcgtggcatcatttcctcgctggtcgcgatgggcaccaattgcggtacgttgagcgcgacggcgatctgggcggtgatgttctttgcgcttgaacgcgaacaactgatcgcctggggatggcgtattcctttcctggcgagcgtcgttgttatgatattcgcgatctggctgcgaatgaatctgaaagaaagtccggtattcgaaaaagtaagcgaaggtgaaaaatcgccagcgttaacgcctgcgtcagaaaatacattgggcgcgatgtttaccagcaaatctttctggctggccaccggtttacgttttggacaagcggggaattcagggcttattcaaaccttccttgccggatatttggttcagacgttattatttaacaaatctatcccaaccgatgcgttaatgataagttccgtaattggttttatcactatcccactcttggggtggttgtccgataaatacggtcgtcggctgccgtatataatattgaatatctccgcgattattctcgcctgaccgatgctgtctattgtggtagataaaacgtatagccctggcgtaattatggcggcgctcattgttattcataactttgccgtgctgggattatttgcgctggaaaacatcaccatggcggaaattttcggatcgcgtaatcgcttcacccggatggcgatttcaaaagaggcagggggctggtggcggtcggttttggccccgtcctcgcagggatcttttgtaacatgaccgattcctggctgcccatcttaattatgctggtgctctactcgtgtattggtctgatttctgcgctgttgatgccggaggtcagagatcgcgacctgagtctgcctgaggatgcggcggaagcgacagcggcagagaagttacgccactccgcaacccagacgagttaaatcgtgtcgacggtatggccggaacgctaatgcggtttcggccatgctgtccggtcacttttgtttaattagcgtaaatccaaatgcaccagggcaggcgttactctgcgactgttccgctttcagaatatagaggttataaaatgcaaaacaggcttttatcggcaaaggcgacgcttcctgattacgatcgcgcggcgctggcggcgcggatggtccatctcggttttggcgcgtttcatcgcgcgcatcagggggtttacacagatattctggctgcggagcagcatagcgactggggctattatgaggttaatcttattggcggcgaacagcagattgccgatctaaagcagcaggataacctctataccgtggcggagatgtcggcggaagcctggacggcgcgtgtggtgggcgtcgtcaaagcggcgttgcatgtccaggttgatggtctggaacgtgtgctggcggcgatgtgcgaaccgcaaatagcgattgtgtctctgaccattaccgagaaagggtattgtcattcgccagccacgggccaacttctgctggaacatcccatgattgccgccgacctgcaaaatccgcatcaaccgctaacggcaccgggtattattgtcgaagcgttagcgcgtcgtaaagccgcaggcttaccggcatttaccgtgatgtcctgcgataacatgccggaaaatgggcatgtgacgcgtcaggttgtgacggcttacgcccgggaggtggatgcggaactggcgatatggatcgagcaaaacgtgacatttccgtcaacgatggttgatcggattgtccctgcggtcacgccggagacgctggataaaatcgaacaactgaccggcgtgcgcgatccggcgggcgttgcctgtgaaccgtttcgtcagtgggtgatagaggatacgtttgtggcgggtcgtccgctgtgggaaaacgcgggcgcgacgttggtcgccgacgtggttccgtttgaagagatgaaactgcgaatgcttaacggcagtcattcattcctggcttatctggggtatcttgccggctatcagcatattaatgactgcatggctgacgacaactatcgtctgaccgcgcaggcgttaatgttacgcgagcaggcgcccacgctgaaagtccagggggtagatttacagcgttatgccgatcagttgattgcgcgttaccgtaatccggcgctgcgtcatcgtacctggcagattgcgatggatggcagccagaaacttccgcagcgtatgctggactccgttcgctggcatcttgctaatcatagcgattttgatttgctggcgctgggcgtggcggggtggatgcgttacgttggcggcgtggatgagcagggtaaggcgatcgacgtcagcgatccgctattgccggttattcagcgcgccgtggcaaacagtgaagaaggcgccagtcgtgttaaggcgctgctgggaatggctgaaattttcggcaacgatttgccgcaggcggcgcggtttacgcaaaaagtgcaagaagcctatgacagtttactgacatatggcgcgaaagcgagtgtggcgaaatatgccgagcggttgaaatagcgtaacagagacccggtagcattatgctaccgggaaggccggagcggttcttagcggccagtggtatcagttcatgccaagacgaatcagttcgaccggcgcgaatttaccttcacaaccttcgacaatcaccgttttgccgcggcgaatttgacctgcatccagaccttcgctctcaatggctttgataatcccggtatgacccgtgccgcttatcatgacccggctaccggtagtgattgcgttacggttacgatcgtatgtcatcatggtgttttctcctttcaaacttacagccaaagcccgcaggtttccccgcatgacgggcgacatataaatacgcttatcgttgcgaattttttttgtttttgatcaagctcacggctttttaggcgggaatgtgcagggtgagaaagcggagaaggcgtctcaccccgacgttaaagggggttactcttcgctaaaccagccgctgttttcctgacggataagctgaacggattcgctaatttcctgcaaatgctgggtcattgcgctctcaaccgcattgccgtcacgattttccagcgcggagaaaatatcatggtgctggcgcaacaacatctccggcggagaaacatgatccagactcatatagcgaacccggtcgattgtcgctttgatattttcaatggtatcccacgctaactggcaatcggcgatctgcgccagcttttggtggaaatcgtcatcaagctggaaaaaatcatcaatctgtttgcgctcgatagcaatatgttgcaggtgcaggttttgcgccagttgatagcactggttgtcggtgatcatcgccgccgcacggcggaccaccgcgcattcgatcgcctgccgaacaaagcagccattctgtacctgagaaagcgaaatcttattcacataactaccgcgctgagggcggatctgaatcaacccattttccgccagctttataaaagcctcgcgcaccggttgacgcgaaacgttaaaacgggttgagacctctttttctgatagcggcgtgccaggcgggataagacaatgcacgatatcacgccgaagaatacggtaaatttgctggttgacaggctgtgtagggttaagctgcgtttcgacggtcattcattcttactttttaggcggttgacccggatactctaccacttttccgtggtggtctataccgatcatgtttctggttgcagatacgtttgccagggattacccggcccgcagaccgggtataaccccttagctacggtggacgctgagccctgcgaaggattgggtaacaggcatcatttcaacggtattaatattcacatgcgcggggagcgtggccacccaccataccgcttcggtaatgtcttctggcgtgagcgcggtggtattttcgtaagttttacccgctttctcatcgtcgcctttgaaacggacgctggaaaactcggtaccgccaaccagacccggttcaatgtcggtcacgcgaaccgccgtgccgtgtaaatccgtgcgcaaattcaggctaaactggcgcacaaaggctttcgtcgcgccatagacgttgccaccagcataaggccaactgccggcggttgaaccgatgttaatgatatgaccgcgattacgttcgaccattcctggcagcacggcgcgggtcatataaattaagcctttattattagtatcgatcatagtttcccagtcttctacgctggctttatgcgccggttcaagacccagcgccagaccggcgttattgaccagcacatcaatatcgcgccactgcgcaggcagagaggccatcatctcttcgatggccgcgcggttgcgcacgtccagttgggcggtcaatacgttctcgccaagctcatcttttaacgcttgcaggcgttcatgacgacgtcccgtggcaatgactttatgtccattctcaacaaaacggcgtgcaatgcactcgccaaaccctgcggttgctccagttactaaaacgatcatcacacagttcctcaacgctttttgtgttgtattaccatagcacgcggcgtttatgaaagggtaatcctggttaacacggttgcggtcagcatagggggaagcttactcttatgatcaacctattttcaggagtgaaaaatgtcgacgaatcctttgttagaccagagtatgttgccttatcaggcaccgcgttttgatcggatcaaagattgccattatcgtcctgcttttgatgagggcgtgcggcaaaaacgcgtggaaatcgaggccatcgtcaatcatccggcggcccctgactttacgaatacgcttctggcgctggagcaaagtggggcgcttctgtcacgcgtcaccagcgtttttttcgcgatgacggccgcgcacactaacgatgaactccagcggttggatgaggccttttctgccgagctggcggcgctctccaacgatatttatctgaatagcgcgttattcgctcgcgtggatgccgtctggcaacagcgtcactcactggggctggatgatgagtcgctacggttggtcgatgtgatccatcagcgttttgtgttggcaggcgcgcagcttgccgaagaggataaagcgcgactgaaggtattgaatactgaatccgcgaccttaatgagtcagtttaatcagcgtctgctggcggcaagtaaagcgggcgggctggcggtagatgacgcgcattgcctggcaggattaagcccggaagaaatgaccgtcgctgctgaagcggcgcgtgaaaaaggcctggaggagcgctggttcattccgctccttaatacgacgcaacagcctgcgcttgctacgctgcgcgatcgccagacccgcgaaaatttattcgcagcgtcatggactcgggcggaaaaaggagatgcccacgatacccgcgctatcgttcagcgtctggtagagattcgtcgctgtcaggcaaaactactgggtttccccaattatgccgcatggaaaatggccgatcagatggcgaaaacgccgcaagccgcactgagctttatgcgtggcattgtgccgccagcgcgtcagcgggtactcaatgaacaggcggaaattcagaacgtcattgatggtgagcagggcggctacaccgttcaggcctgggactggatgttctatgccgaacaggtacggcgggaaaaatatgcgttagatgaagcgcaactgaagccctattttgccttaaatacggtgttgcaagagggggttttctggaccgccaaccagctattcggcatcaccttcgtcgagcgttttgacattccggtgtatcaccctgatgttcgggtgtgggagattttcgattccgatggtgtcggcatggcgttattttatggcgacttcttcgcgcgggactcgaaaagcggcggcgcgtggatggggaattttgtcgagcaatccacactcaatgaaacccggcccgttatatacaacgtatgtaactatcagaaacctgttgatgggcagcctgcattactgctttgggacgacgttattacactcttccatgagtttggtcatacgttgcatggtttgtttgccgtccagcgttatgccacgctttcaggtaccaatacgccccgcgactttgtcgagtttccctcccagattaatgagcattgggcgagccatccacgtgtgttcgaacgctacgcgcgtcatgtcgacagcggtgaaaaaatgcctgctgatttacaggaaagaatgcgcaaggcgagtttatttaataaaggttacgatatgactgaattgctcggcgccgcattgctggatatgcgctggcatatgctggaggagagcgtagcagagcagtctgtcgctgagttcgagcagcaggcgctggccgccgagcatcttgatttaccggcagtgccgccccgctatcgcagcagttattttgcccatatcttcggcggcggctatgcagcgggatactacgcctatctgtggacgcaaatgttagcggatgacggttatcaatggtttgtagagcagggcggcctgacgcgtgaaaacgggcagcgttttcgtgatgctatccttgcccgggggaatagtactgatttagaaacgctttattcagcctggcgtggacatgaaccgcatattgaccccatgttgcaatatcgtgggctcgatcgctaagctgatacggttgttcggcactgtcgaacaaccgcctgaaaatgaatcctgaacttctgatgacagccagttaaatttatggggttaagttgtctgaatataaagagggcgtgcattcggatttttctacttatttttccgtggtggcttgattgccaaagatttattaccgcttcgctgttgatgttttcaaaaaatatatcttccgccatgtgatggtattatgtaaataatgcagaaatgaatttgacactgcgcacagggcgactagatttagaactgtatcacatgatatgagaagacatatcatatttaaaacgcaacatcatcatgaggattatattatggcagaacatcgcggcggttccggtaattttgcagaagataaagagaaagcctcagaagcaggtcgtaaaggcggccagcatagcggtgggaactttaaaaacgacccacaacgtgcatctgaagcgggtaaaaaaggtggccaaaatagccacagtggtggacggaaatccggcaattaattttactgctgatatttcataaatatattctgaaatattgcacatacgatgcgggccataggctcgcatttttttattctgaccgggagttattctgaccggtcagatgaaattattgtttatgctttcttcgttaacagaaaaagcaattcagcgagggcgaagcgtacgcatttttccaatacttcctgacaatctccgttgaaatgttgtcggcttgtaaaagttgtattgttaatattccaggcaaaccaaactgtgcccgccggcgtgccatcttcgccgccttccggaccgccatagccgctgatcgctatgctgatattgacctcagcctgatccttagcgccctgtgccatttcagtaacaaccgcttcgctgacggcggtatgttcggcaagactgtggcgttgtacgcgtaagatttttgctttggcttcatcagtaaaggtgacataccccacaccgtaaaatgagggcgtatcttctgctgcgcacaatgctgaagccagtttcccgccagtgcaggattctgcagtggtcagacggagtttctggttaaccagtaaatcaccaagtttttttgtcaggctatcgacggattcggcttcatcaagggtgacaatatcgtgctgttctaatctcatcgtttatttttccgttacagagacaaatgaaatctgttcgttcttctcaagtatggcatatttattttatgacattgtcagtgaatgattattttatccagttaccaacaaacccgctgttgcataacttgcttactttcttacggcgatgactgtcattgattatgtggaaggccattatcctcaaaaaataaagccgattattctgaattgctatccagacgttgatgcatatgacttcagctatgtggcaagttaactattacgccgttacgctttcgcgctcactggcgctgatatcggttgcatattaatccggatgggttgattttattgcttaatattctgcgggtaaattcatgtttgtaaaaactaaaaatagcggccagacttaatacgtcaaatagacgttattaaggagagagcatgaaactacaggtggctgcatttttaagttttctgataatgccttacgcgctagcggatgatcaagggggattaaaaaaagacgtggcaccgccgccgcctcatgctattgaggatggttatcgcggtacggatgatgcagaaaaaatgaccatcgaacaggcaaaaaccctgcatgatggcgcgaccgtttcgctgcgcggcaaccttattgatcataaaggcgacgatcgctatgtatttcgtgataaatccggcgagattaacgtgataattccttccgccgtatttgatgggcgggaagttcagccggatcaaatgatcaacattaacggtagcctggacaagaaagcgaaggaaccgcttgttcgcgtgaaccgactgcaaaaataacgcgcgctaaccggcaatctccaggtcagccatacggggcacgcggctggcctgataccatgggtcttgtaaaagcgcctgggggacaaaaggtcccataatgtcttattcaggtctggttgcgtatcgtttaagcttcattgatattgacggtgctacagtcgttagcgatccgttatcctcgcaagaatttgcccggtagcgtataagcaaaacacaaatctatccatgcaagcatttaccgctggtgaaccggcggtttttttttgcctgccatccagacaaaagcggccccttgcgcaacgatgcagcaaggggccggctctgcgagggattatctccgttcattaatcatcccatttgtgactgaaccaggcggccagaaatccggaaaataaaataattcctaatacaacgataaaaaggttaatactgcctaacatctcgtttctccttattttagtgtgcatcctcttttttaaaaaacctcgtacagactatagtactaatttatacttaagcaaagtctgaattgcgtatttattttactggaagggtaaagcattagaatattttcgtcagcgcccaggaatattcctgaattaccgcagtgacagcagataattagcctgcaatatatagggttaacccggtgcgccagaaactgcgcacatcactggctgcagataattaacaggtaatagcctgttgcgtaggggtaatccgcattccttttaacatcagtgcccaggcgaacacaatggcgattatcaggacaacgaaaagcgaccaggctggaagcgtcgtcaggatgacgccgctggccagcgggtttaccgccgcacccagccagcccagcgattgcgctgaaaaatagctggctttcatcccggcaggcgcaatgttgtcaattaacatatattcgccgggggcataaataatttcgccaatcgtgaatactgccgctgaaagcccccaaaaaaacagattgtcgcctgaaaaaataaatccgatgagcccggcgataaaaaagacggtgccggtcgtcatcattggtcgaatattgacggcggtaagtcgacggcccacggcgtattgcaaactgaccacaataaccgcattaaccggcaggacgacggctaccactttttccgcgaagccgctatcggcaacgaccataacgtactgtgaaatacaggacgcaaaggcgccccccacaaaggaggccagaaatgccgaaagcgtaaaccacaataatgctttgtcgcgcagcagaacggagggagaccagatagcggcatttttcccctcgctggcggcaaccgatcgtgtcacccatacctgaataaagaccagcgggaatgcggagcagatggcggcaagccagaagggtaaattgatgctttgcatcaccagcagcgtgccgagcggcgggccaaccgtccagccgatattgagtacggtatagttgagcgaaaaaatccgtgtttttgttgtcgcggtgagattatcggcgaaccaggccttcaggacggtagaaaaaaccgaataggcgcagttaataagcgcaaaaagcaggacaaccagtacgacattatgcaccattgggatggcgataaatccgcaggcgaaggcgataatcgcgagtaacatgtagcgctttttatcaaacttgtccgccagaatcccaaagccaagactaaagatgacgccgatcgttaacgcgctggtcagcgcgtagccaatcagatccacgcctaaaccgtactgacggttaagatagatggtcataaaggggagcgtggcgccgcgtccaattgtcaataacagcgatgaggcgagtagagccaacgtcgaacgtctcaatcctggattcatttttcctgcctgaaatggaggttacgtatcgggacgttttaatctaccgtgcccgcaaaagcatgatgtctatacgctatagcgtagtcttaacataccataacgcaggattttgcccatcgtgtgttgttcaatgccatgctcacggtaaaaagaaaagtcctgttatggcgcactgatttccgataacttacctttttacaaaattttaataatgacaggggccgatgatgtcgcgtaaagacggttttttggcgttactggtggttgtcgtatgggggctcaattttgttgtcatcaaagtaggcctgcaccatatgccgccattattgctggcaggattacgatttttactggtggcgtttccggcaattttctttgtcgcccggcctaaagtcccgcttacgctgttgctgggctatgggctgacgataagctttgggcagttcgcctttctcttttgcgcgataaagtttggtatgcccgcaggactggcgtcgttggtattacaggcgcaggccttttttaccatggcattgggggcgtttgtttttagcgagcggttacaacgtaagcagttggcggggatcgccctggcgattataggtgtactggtattgattgaagccagtctcaacggacagcatatagcgatgtcgggatttatgctgactctggcggcggcatttagctgggcctgcggcaatatctttaataaaaaaattatgcaacatagtccgcgcccggcggtgatgtcgctggtggtctggagcgcgctgatcccgatcctgccgttcctgctgtcatcgctgctactggagggggcggatcacattacgcaaagccttattaccatcgatatgacgacgatattgtcgctgctttatctggcttttgtcgccactatacttggctacggcatctggggcgcgttactggggcgctatgagacctggcgcgtggcgccgttatcattgctggtgccggtagtcgggctggcgagcgccgcggtgttactcggggaaacgttgaccgggatgcagcttgcgggcgcagtactgattatggctggactctatatcaatgtgtttggatttcgtgtgcgccgtactgcgcgtgtcagcggatgaggcattatgttactaagaagacaaacgctaatttcagaccatgccgcggggtaatagcggcggacttgtcatagccagacggtactaaaaaaatgccccgcaaaacggggcaaagaggttaaaggtgttggtcgttataatagggcacgcctaattcatctgacttatcgctgttcacgctcacggggtgaaggtcatttggcggatcgcctacacagggcagcagcatcacatcgcggctattttgcgccacaggtaacaaagtttgttctgcaatgccatatccggaggcgataagtaacagacccggcagggcgggaaacagcattttcatggtgctcttcgcgtggcgcataaacaaactagtagttgccatggttcagcggcagcatataccgtgattcgccatgcatattggtgatccggtatttgtgtggcggcacatcaaaatagtttttgaacgtccgggtcaatgtttgctgtgactcaaagccatagcgttccgccagatagagaatgggctcgttgctctcttttaatttttgcgcgatttccgtcattttacggctgcggatgtattggcctaatgaatgaccggtctcttttttaaacatccgttgcaggtgccatttggaatatcctgaacgctcagacactttttccagtgagagcggcgactccaggttatcctcgatccagtccaaaatgctatgaatagtaatagcgtcagtgttgcgtctggacatcgtcatacctcttttttgtctacggcagaattttcttgagcaaatactcaagcgttgccacttcgtccgccgttaagttttttgttaattcctgatgcaggtcttgccctggtcgttgatgacattgctcacaaattgccgcgccgtccggcgttagcttcaccagtacgccgcgtttgtcattaggattcggcagtctttcgatccagcctttgcacagcaggcggtcgagcatccgcgtcaatgcgccgagatcgacagacagcacttttttaagttcaaccggggtaatacatcccgcgcagcgtatcgagcaaagcactttaaactgtgttgcggtgatatccagcggggataaatagttatttaacaggcgatcttttttctgatttaccatgtagatcaagcgacccagcggaatgatttcattgaacagatcactggtgcttttcaaaatggttgccccggcaagtaattaatttcgtcagatactattgcccaggcaagtataagtcaactaaatgaattggccgatgccacgatttgctaaaaggcgtccggggtattgtgctgtgataacttgtaactaattgataattacaggttataggttgtagaggatattaacttgcacactggcgaaatggcgcgcctgggcaatttcactttatacttccggttcatgaaacgctgatgggtaagagatagtattatgatggatttgtttaaagcgattggattggggctggtcgtactgctcccgttagccaatccgctaaccaccgtggcgctgtttcttggccttgcgggcaatatgaatagtgcggaacgcaaccggcagtcctatatggcttcggtttatgtcttcgctattatgatggtggcgtactacgccgggcagttagtcatgaacaccttcggtatttcgattccagggctacggatcgccggggggttaatcgtggcgtttatcggcttcagaatgcttttcccgcagcagaaggcgcatgagtcgccggaagcgaaaagcaaatcggaggagctggcagacgaaccgacggccaatattgcgtttgttccactggctatgccaagcaccgcaggaccggggaccatcgcaatgatcatcagttccgcttccacggtgcgtcatggcggcgagtttcccgactgggtcattatggtcgcgccgccgattatttttcttgccgtggcggtgatcctgtggggatgcttacgcagttctggcgctattatgcggctggtgggtaaaggggggattgaagcgatctcccgcttaatgggattcctgctggtgtgtatgggcgtgcaatttattatcaacggcgtgttggaaattattaaaacgtaccactaaggcgcattttcgtctgccggaaacctgttcccggcagacgaatgtcttaatgcggttgttcttccagcgtcactggccatttgcggaatatgagcacagcccataccagcgcggcacaggcgggtatggcgccaatatagccgatggccgacattgaccagtgcaaactcacctgattacctaccagcgcgccagcgccaataccaatattaaagatgcctgaaaatagcgccattgcgacatcggtcgcgtccggggccagcgccagtactttcacctgcataccgagccctatcaccataatcgcgatgccccagaaaatgctcagtatggccagatgcgcttcgctctccgccgcgggcagcagcagcagcagcagacagacaaccagcagggcaatagcgatactgacgagcgacgaggcatggcgattacccagtttaccaaacacgaggctgccgatgatcccggcgccgccgaggatcagtaacaggacggtagcaaaattcgcactgagcccggcgacattctgaacgaacggttcaatatagctataagctgtgtaatgcgcagtcaccacaacgacggtcagtacatagaggctcatcagcgccgggcgtcggaatagcaaaggtaaactttttagtgagccggaatgctcgctcggcaatttcggtagaagcttaatcagacatagcagcgtaattaatgcgcccatgccgatggcaaaaaaggtggtgcgccagccaaaatactgaccaacaacgcgacctatgggcagcccaagcaccatggccaacgcggtgccggtcgctatcagacttaatgcctgcgcgcgtttcccggcaggggccaggcggatcgccagcgaggcggttatcgaccagaaaatagcgtgggcgaaagcgataccaatacggctaatgaccagcacggtaaagttccatgccagaaaggagagcacatggctggcaataaacaaaacaaacagataaatgagtagcttacggcgctccatttgactggtaagaagcataaaaggcagcgacatgacggcaactacccaggcgtaaatggttagcatgatgccgacctgcgcggtttgcatatgaaagctttcagcaatgtctgatagcaaaccaactggcacaaattctgtggtattgaaaataaaagcggcaatagcaagcgtaactacccgtagccacgcgaccttgcgggaaactggattgattgtcataaaaatatttcgggttagttgcgagaaggtgagaccgcgatcttaaaacgtttactggcgaaaagacaatcattttgtgacctgcttctcatttacttcgcaggccgtttcgtcttcagtcggtgctcgccagttgggcgttaagtaactcgataaaggcctcaagctgacgcgtcatcgccccgcgccgccacattagccatgtgttaagccagcgccacttctccgccaacggccaggcttccacctgatgatgtcctggcatactgttgagcatacttgctggcatcagcgcaatacctgcgccggcaattacgcacgccaacattccatgatatgactccatttcgtgaatcgtaccgggggtcgcgccatcggcatgaaaccagctttcgaaatgccgtcggtaagaacagttggcgcgaaaagcatagatgttataaccattcacctcgctggcccgcgaaacgacggaatggccgtgtggcgcgacgatcatcatctcttcctggtaagccggtataccttccagccccggatgcattagcgggccatcaataaaggcggcgttcagctttccctcgagcacgccatccagcatggcgccggaaggaccggtcgttaacgcgaactgaattttagggtaacgctggttataacccgccagcagcgcggggatacgtacggcggcagtactttctaacgcgccgagtgaaaacagtccttgcggttcctctccggcaaccaccatgcgggcttcatcgaccagcgccaggatctgctggctgtaacgtaaaaagttatgcccggctggtgacagcctgagtcgctggttttcgcgaataaacagagagacgcccaggtcggcttcaagctgacggatacgcgtggtcaggttggacggaacgcggtgcacttttgccgccgcctgcgtaatgctgcccgtcagagcgacagcgttaaacatttccagttgcgtcaggtccatggttttctcaattcgtgaatagtctggttaatattattcatttttcagaaagggtaaagggcgtcatgatggtacaactcccctgataacgagagaaagaacatgaccatgatgactgcaacacaggcgttatccgtgaatcctgcgaccggccagacgctggcggcaatgccctgggctaacgcgcaagagattgaacatgcgctgagtctggcggcgagcggtttcaaaaagtggaaaatgacatcggtagcgcaacgggcgcaaacattacgcgatattggtcaggcgcttcgcgctcatgcagaagagatggcgcaatgtattacgcgtgaaatgggtaaacccataaagcaggcgcgtgcggaagtgacgaaatccgccgcgttatgcgactggtatgcggaacatggcccggcaatgctgaatcctgagcctacgttggtagaaaatcagcaggcggtgattgaataccgtccgctgggcgtcattctggcgataatgccgtggaattttcctttatggcaggtgttacgcggggcagtgccgatactgctggcggggaatagctacttgttaaaacatgcgcccaatgtcacgggttgcgcgcagatgatagcccgaatcttggcggaagccggtactcccgctggcgtctatggatgggtgaacgctaataatgagggcgtgagtcagatgattaacgatccgcgaatcgcggcggtgacggtgaccggtagcgtgcgcgccggcgcggcgattggcgctcaggctggggcggcgctgaaaaagtgcgtactggaactgggtggctcggatccgtttattgtactcaatgatgccgatctcgagttggcggtaaaagctgcggttgccggacgctatcaaaacaccggacaagtctgcgccgccgccaaacgttttattgtcgaagagggcattgcgcaggcgtttaccgatcgttttgtggcggctgccgcagcattaaagatgggtgatcctctggttgaagagaatgacctggggccgatggcgcgctttgatttgcgtgatgaactccatcaacaggtgcaggcttccgtcgccgaaggcgcacggctactgttgggcggggagaaaatcgccggggagggcaactattatgccgcgaccgttctggcggatgttacacctgacatgacggcatttcgtcaggaactttttgggcctgttgccgccattaccgtcgcaaaagatgcggcgcacgccctcgcgctggcgaatgacagtgagtttggcctgtcggcgacgatctttaccgccgacgatacgctggccgcggagatggcggcgcgtcttgagtgcggtggggtattcattaatggttacagcgccagcgatgcgcgtgtggcattcggcggggtgaagaaaagcggcttcggtcgcgagctttcgcactttggtttacacgaattttgtaatgtgcagaccgtctggaagaaccgcgtctaatcgccctgacgtcgcgtggcgccctctgctatactcgcaggccttttcagacctgcgagcaaggagcatgttgtggccagggccatggataatgcaattttagagacgattttacagcgcgttcgccccctcattggccagggcaaagtcgctgactatattccggcattagcgtccgtcgaaggttcaaagctggggatagcgatttgtaccgtggacgggcagcattatcaggcgggcgatgcgcacgaacgcttctctattcagtctatttcgaaagtgctcagtctggtggtggcgatgcgtcattatccggaagaggagatctggcagcgcgtcggaaaagatccttccggctcgccgttcaattcgttggttcagttagagatggaacaaggcatcccgcgtaatccatttattaatgcgggcgcgctggtggtatgcgacatgttgcaaggccggcttagcgcgccgcgtcagcggatgctggaagttgtgcgcgcgctttgcggcgtatcggatattacgtatgacgctacggtcgcgcgctctgaatttgagcattccgcccgtaacgccgctattgcctggctgatgaaatcattcggtaattttcatcatgatgtgcctaccgtgttgcaaaattactttcactactgtgcgttgaaaatgagctgcatggaactggcgaggacgtttgtctttctggcgaatcagggcgaggcgtttcatctcgacgagccggtagtgacccccatgcaggcccggcagattaatgcgctaatggcgaccagcgggatgtatcagaatgccggcgagtttgcctggcgggtgggattgcccgctaaatccggcgtgggcggcggtattgtcgccatagtgccgcatgaaatggcgattgccgtctggagtccggagctggatcctgcgggaaactctctggcaggtatcgccgcgcttgagcaattaacacaaacgttaggacgttcggtatactgatgaatgcgcttgaaccgctctttgcccgcctggcgcgatcgacatttcgttcgcgttttcgtctcgggataaaagaaagacaatattgctgggataaaggcgcggaggtgattgataaacacgccgccgattttatcgcccagcgactggcgccagctcacccggcgaatgatggtaagcaaacgccgatgcggggccatccggtatttatcgcgcaacatgcgacggcaacctgctgtcgcgggtgcctggcgaagtggcaccagatacctcagggagaaccgctgagcgaagcgcagcaacagtatattgtcagcgttatccattactggctggtcatacaaatgaatcagcggtagagcagcgcgtcgttgctgacgctttccctgataaattaccctcataccactgatagcagccgttgaccgtcatatatctcatgcgctgaagcgcatatttagttacaacatacagttagttgttttttttcaacgcctgtcagcactgtgcaaaaaaatgttctacagggcagggaacccgtgtatcaccagaagcttgcaacc

(The sequence listing continues in the following parts.)

1.-2. (canceled)

3. An engineered Salmonella enterica serovar Typhimurium (S. Typhimurium) bacterium comprising:
a combination of gene deletions, where each gene in the combination of gene deletions are each independently selected from the group consisting of:
STM14_1981, STM14_1982, STM14_1983, STM14_1984, STM14_1985, STM14_1986, STM14_1987, STM14_1988, STM14_1989, STM14_1990, STM14_1991, STM14_1992, STM14_1993, STM14_1994, STM14_1995, STM14_1996, STM14_1997, STM14_1998, STM14_1999, STM14_2000, STM14_2001, STM14_2002, STM14_2003, STM14_2004, STM14_2005, STM14_2006, and STM14_2007, wherein the combination of gene deletions is not the combination of STM14_1982, STM14_1983, STM14_1984, STM14_1985, STM14_1986, STM14_1987, STM14_1988, STM14_1989, STM14_1990, STM14_1991, STM14_1992, STM14_1993, STM14_1994, STM14_1995, STM14_1996, STM14_1997 STM14_1998, STM14_1999, STM14_2000, STM14_2001, STM14_2002, STM14_2003, STM14_2004, STM14_2005, and STM14_2006.

4. The engineered S. Typhimurium bacterium of claim 3, wherein the engineered S. Typhimurium bacterium has decreased virulence as compared to wild-type S. Typhimurium.

5. The engineered Salmonella enterica serovar Typhimurium (S. Typhimurium) bacterium of claim 3, wherein the combination of gene deletions consists of 26 deleted genes and wherein the 26 deleted genes are STM14_1981, STM14_1982, STM14_1983, STM14_1984, STM14_1985, STM14_1986, STM14_1987, STM14_1988, STM14_1989, STM14_1990, STM14_1991, STM14_1992, STM14_1993, STM14_1994, STM14_1995, STM14_1996, STM14_1997, STM14_1998, STM14_1999, STM14_2000, STM14_2001, STM14_2002, STM14_2003, STM14_2004, STM14_2005, and STM14_2006.

6. The engineered S. Typhimurium bacterium of claim 5, wherein the engineered S. Typhimurium bacterium has decreased virulence as compared to wild-type S. Typhimurium.

7. The engineered S .Typhimurium bacterium of claim 3, wherein the combination of gene deletions consists of 24 deleted genes and wherein the 24 deleted genes are STM14 1981, STM14 1982, STM14 1983, STM14 1984, STM14 1985, STM14 1986, STM14 1987, STM14 1988, STM14 1989, STM14 1990, STM14 1991, STM14 1992, STM14 1993, STM14 1994, STM14 1995, STM14 1996, STM14 1998, STM14 1999, STM14 2000, STM14 2001, STM14 2003, STM14 2004, STM14 2005, and STM14 2006.

8. The engineered S. Typhimurium bacterium of claim 7, wherein the engineered S. Typhimurium bacterium has decreased virulence as compared to wild-type S. Typhimurium.

9. The engineered S. Typhimurium bacterium of claim 3, wherein the the engineered S. Typhimurium further comprises a foreign epitope.

10-19. (canceled)

20. A vaccine comprising:
an engineered Salmonella enterica serovar Typhimurium (S. Typhimurium) bacterium comprising:
a combination of gene deletions, where each gene in the combination of gene deletions are each independently selected from the group consisting of: STM14_1981, STM14_1982, STM14_1983, STM14_1984, STM14_1985, STM14_1986, STM14_1987, STM14_1988, STM14_1989, STM14_1990, STM14_1991, STM14_1992, STM14_1993, STM14_1994, STM14_1995, STM14_1996, STM14_1997, STM14_1998, STM14_1999, STM14_2000, STM14_2001, STM14_2002, STM14_2003, STM14_2004, STM14_2005, STM14_2006, and STM14_2007, wherein the combination of gene deletions is not the combination of STM14_1982, STM14_1983, STM14_1984, STM14_1985, STM14_1986, STM14_1987, STM14_1988, STM14_1989, STM14_1990, STM14_1991, STM14_1992, STM14_1993, STM14_1994, STM14_1995, STM14_1996, STM14_1997 STM14_1998, STM14_1999, STM14_2000, STM14_2001 STM14_2002 STM14_2003 STM14_2004 STM14_2005 and STM14_2006.

21. The vaccine of claim 20, wherein the combination of gene deletions consists of 26 deleted genes and wherein the 26 deleted genes are STM14_1981, STM14_1982, STM14_1983 STM14_1984, STM14_1985, STM14_1986, STM14_1987, STM14_1988, STM14_1989 STM14_1990, STM14_1991, STM14_1992, STM14_1993, ,STM14_1994, STM14_1995 STM14_1996, STM14_1997, STM14_1998, STM14_1999, STM14_2000, STM14_2001 STM14_2002 STM14_2003 STM14_2004 STM14_2005 and STM142006.

21. The vaccine of claim 20, wherein the combination of gene deletions consists of 24 deleted genes and wherein the 24 deleted genes are STM14_1981, STM14_1982, STM14_1983, STM14_1984, STM14_1985, STM14_1986, STM14_1987, STM14_1988, STM14_1989, STM14_1990, STM14_1991, STM14_1992, STM14_1993, STM14_1994, STM14_1995, STM14_1996, STM14_1998, STM14_1999, STM14_2000, STM14_2001, STM14_2003, STM14_2004, STM14_2005, and STM14_2006.

22. The vaccine of claim 20, wherein the engineered S. Typhimurium_further comprises a foreign epitope.

23. The vaccine of claim 20, further comprising an adjuvant.

24. The vaccine of claim 20, wherein the vaccine contains from about 10⁷ colony forming units of the engineered S. Typhimurium to about 10⁸ colony forming units of the engineered S. Typhimurium.

25. A method comprising:
administering a vaccine to a subject in need thereof, wherein the vaccine comprises an engineered Salmonella enterica serovar Typhimurium (S. Typhimurium) bacterium comprising:
a combination of gene deletions, where each gene in the combination of gene deletions are each independently selected from the group consisting of: STM14_1981, STM14_1982, STM14_1983, STM14_1984, STM14_1985, STM14_1986, STM14_1987, STM14_1988, STM14_1989, STM14_1990, STM14_1991, STM14_1992, STM14_1993, STM14_1994, STM14_1995, STM14_1996, STM14_1997, STM14_1998, STM14_1999, STM14_2000, STM14_2001, STM14_2002, STM14_2003, STM14_2004, STM14_2005, STM14_2006, and STM14_2007, wherein the combination of gene deletions is not the combination of STM14_1982, STM14_1983, STM14_1984, STM14_1985, STM14_1986, STM14_1987, STM14_1988, STM14_1989, STM14_1990, STM14_1991, STM14_1992, STM14_1993, STM14_1994, STM14_1995, STM14_1996, STM14_1997 STM14_1998, STM14_1999, STM14_2000, STM14_2001, STM14_2002, STM14_2003, STM14_2004, STM14_2005, and STM14_2006.

26. The method of claim 25, wherein the combination of gene deletions consists of 26 deleted genes, wherein the 26 deleted genes are STM14_1981, STM14_1982, STM14_1983, STM14_1984, STM14_1985, STM14_1986, STM14_1987, STM14_1988, STM14_1989, STM14_1990, STM14_1991, STM14_1992, STM14_1993, STM14_1994, STM14_1995, STM14_1996, STM14_1997, STM14_1998, STM14_1999, STM14_2000, STM14_2001, STM14_2002, STM14_2003, STM14_2004, STM14_2005, and STM14_2006.

27. The method of claim 25, wherein the combination of gene deletions consists of 24 deleted genes and wherein the 24 deleted genes are STM14_1981, STM14_1982, STM14 1983 STM14_1984, STM14_1985, STM14_1986, STM14_1987, STM14_1988, STM14 1989 STM14_1990, STM14_1991, STM14_1992, STM14_1993, STM14_1994, STM14 1995 STM14_1996, STM14_1998, STM14_1999, STM14_2000, STM14_2001, STM14_2003 STM14_2004 STM14_2005 and STM14_2006.

28. The method of claim 25, wherein the engineered S. Typhimurium_further comprises a foreign epitope.

29. The method of claim 25, wherein the vaccine contains from about 10⁷ colony forming units of the engineered S. Typhimurium to about 10⁸ colony forming units of the engineered S. Typhimurium.

30. The method of claim 25, wherein the vaccine is effective to induce an immune response in the subject.

31. The method of claim 25, wherein the vaccine is effective to treat or prevent Salmonella enterica serovar Typhimurium infection in the subject in need thereof.
